United States Patent Application Publication US 2025/0205292 A1 - sequence listing, part 16

SEQ ID NO: 27 - DNA, 2405142 bp, Bifidobacterium pseudocatenulatum
  source 1..2405142: mol_type = genomic DNA
gtggccgacacgacaactgaccctctcgagcaggctcggggagtctggtccgacgcgctggcgttgttgcaccagaatccggcgctgtccatccgagataaaagctggctggaaaacgtttttcccgaaggcatgtggggtcctaccattgtcttatgcgtgccaagcgcggccgcacagcagacgttgcagaacgaattgaaccagcccctgctggaagccttgcgggaagctgccgaacaggatattttccccgcattcaagattgtggaaaagaaggaaccggcccaacctgccgtcgaggaatacccccacttctcccccgcgccacatgcggaggaaaccacgcaggggcagctgccgattccggttgttatgccgccggagcgccacaacaacttccaacgcggccaaaacaggcctctgctggatcctaagacccatttgaataagaacgccacgttcgacaccttcgttcctggcgattccaatcgtttcgcacgtaccgtcgcgttggccgtcgcggaaggttccggtcacgatttcaacccgctttgtatttacggcggatcaggattgggtaaaacccacttgctgaacgccatcggcaattacgcactggtcaaggatcccacgctgaaagtccgttatgtgaccagtgaggaattcaccaacgaattcatcgaagcgttgggtgacaccaaccagaattccggtcaaatcaaggaattcaaccgtcgctaccgcgaagtcgacgtgctgctcatcgacgatattcaatttctgagcggcaaggacgcgacgcttgaacagttcttccatacattcaataccctgcatcaggcgaacaagcgcattgtgatcgcatccgatgtgcctccgaaggatctgcagggattcaacgaacgtctgatctcccgtttcgaatccggcctgaccgttgacgtcaagccgccggatctggagacgcgcatcgccattctgcgcatgatcgcccacggcaccaacgttcaggacgatgtgctcaacctcatcgcggagcggttcaccgagaatattcgcgagctggaaggcgcgctgaaccgcgtgaccgccatggcatcgctgagcggccagccggtgacccgcgcgttggcggaacagacgttgcaggactttttctcgaccgatgtggagatcaagcccaccgacatcatcacccaggtggccaagtacttctacattacgttcgatgacattgtcggacgttcgcgtacgaagaagatcgcgctggcgcgtcagatcgccatgtatttggtgcgtgagctcaccagcatgagcctgaacgacatcggccaggtgtttggcggcaaggaccacaccacggtgatgcatgcatacacccgcatcagcgacgagatgcaggaaaagcaggagatctacaactacgtgacggaactgaccctgcagctcaagcagcgttccggcgaaaaataacgttttctatgcgactttgcgcgtttgcatgtgttttcgtgcgtctcaaaaaaacgattttaggcgttttctgcctttctcaggcgattttcacaagccaagtatgagtatcagtaaattctttatcaactgttttaccgaccatcctgacacgccggcctgtggaagatttttattgaagttatccacatggttatacacaaatcaatgatttctcggtggaaaacccgttggaaacgccagaatcgccggtggatgaattgtgtactatccacatggttttgtggataattttttcaaagcgacgaggctgtggataacccgatgatttgtccacacttcgtccaaaagttatccacaatcaatgagatgttgcgagccattgcaaaacgtggggtctgagcacttacccacattatccacaggccttattatgacgaatataggttgttataagaaattcatcatcgtcgtcataagtggggaattccccacgcttcgtcaaacgctgacagtctcgctagaatgacttatagaccgaacgaaacgaggaaactagccatgaaagttgaagtcaattcccaagcgctggcagacgcagtagcctggaccactcgcgtgatcgacgctcgtcctgcatccccaattttggcaggcattcgcttggaggccatcgacggcaccctccagctttccgccttcaattacgccatttccgcacgccaccatatcgaagcaggcgttgatgaaagcggatccattctggtgctcggcaagctgctggcagatatcaccaagtcgcttcccgccgcgaaaacctacctgtccactgacggatccacactgaccatcacgtcgggcaagtccaccttcaccatgcagctcatgccggataacgaatatccggatctgccggtggttcccgccaaactggggcaggtggacgcccaaaccttcgcacaggccgtcgcccaggcgtccgtcgccgtttcccgcgaggagaaccgtccggtactgaccggcattcgtgtgcagttccaaggcaacaaggtgatcatgagctccaccgaccgattccgcttgtcgcgttcgagcttcacctggacgccggaaaacccggacatcaacaccaccgcactcgtgcgcggcgcactgttgcgcgatgtggcccgttccttggacgagcatcaaaacatcgtcgtggatttcgatccggagaatccgtcgctgctgggctttgagaacgccggacgcgtatccacctcgcagctgatcgacggcgaattccccgcggtggaccgcctgtacgctgacgaatacccgattcatgcggtcatcaacaagcaggatctcatcagcgccatcaagcgcgtgtccctcgtggccgaacgcaacgctccgatccgcatggccttcaccagccaggaactcacgctgaccgcaggctcggtggatgaagcccaagccaaggagatcctcgacatcgacatggatggcgaagacatcaccgtggccttcaatcccgcctacctgatcgaaggcctgagcgccatcagcgagccgttcgtacgcatgaagatgaccaccgcggtcaagccggtggaattcaacggccagcaggaatcgaattccgaagaatccatggactaccgctacctgctcgtgccgatgcgcttcaacagctgaactaagctgacctacacgaaaacgcggatacatcgcaaaaaatagggctgaacatggctgttattgccagttcagcccatttgcatgattaattgcgattatttacgtaagaaattcgcactatctcaaggatcttgcatgtatatttcccgactggcactcgaccactaccgatcgtgggaacattgcgtgctcgatttcaaaccgggaatcaacattctgcaaggtgccaacggactcggcaaaaccaatatcgtggaagccatcgaagtgctttccacaggatccagccatcgcgcgtcatcatcactgccattaatcgaaaaagggtgcacgtcggccaccatccgagccaacgtggaagacggtgaaacgcagcacacctacgaggcgaccatcgtggcacggggtgctaaccgagcgcgcatcgacggcggaaaatctcaatatatgagggatctcatcgggcgcacgccctccgtctcctttacccctgaagatcaacgtctggtagcaggggatcccgcaatccgacgcaacttcatcaaccaggccgcgtctctgctgctcccccactatgcgcagaccctgcaacagttcacgcacgtggcgaaacagcgcacggcactgctcaaacaactcggcgacggcacgaatctcgacccgcaatacggccagcaggcggtcttaagcgggctggaaatctggacggggcaattcatcgacctcggcatgcagctgacgcgggaccgcaacaacgtgatctcacgcttggaagagccttttgcgcggatctacgcgtctttggcgggagatgacgaacgggcggcgctcgcctacgagccgtccttcgacgaagtgatgctgttcgacgatccggccgcggagatcagccgccatttccaacgcatctaccccggcgaagtggcgcgcgggcagaatctgatcggtccgcatcgcgacgacctgactttgctgctcaacgatatgaccgcacgcgaattcgcgtccaacggtgagatgtggaccatggctttggcgttgaaaatggcgctatacgaggcggtttccgcacattttgaaagcaagccaatcgtgattctcgatgatgtgttcgcacagcttgacgagtcccgtcgtgggcagatcctcgattttgcgatgcggcaggaccaggtgctgatcaccgtcgccgcggcaggcgatattccgcacatggatgctgggcgctttcacgcggacgcgcatgtgatcgacgtggacgcgttgcgcaggcaatcgcaagatggacagcatgacgatttgacggcgatgatggcgcaacttgtcgcgggacgggaatctgcagcgcaatcgtctgcagcgcaacagtcggtgaatcgacaggagcagcgctgatgccgaatcctccaatctgcgaaacattgcatatcgaccaacgcaagttgcccgccgaagtattcgaacgtatcagccgacgtgccggccgatataaggaacgtgaggaacgtgcgcggcaggcgtgggagaatttcggcaaacccggacgcgacccgcagacggtcggcaatattttcaacgtgatcgcaacgcaaggttcctggacgccgcatctgaaaatcgcgcagatgcagaatcattgggatcaggtggtcggcgtcgaaaacgcgcgccactcctaccccgtcgacctgcgcgacggcattctgacgatccgatgcgacagccccgcatggaccaccaccttgacgtacatgattccgctgctgaccgacaccattcgccgtaggctcgaggggctgaccatcaacgaggtgcgcgtcaccggcccgcaacaacagggattcagccgaggacgaatgacacgaaggccgcgatattagcgcgacaccacgtgctatcagacgttcgttgaaggcgtttcgtcgaagaattccccctgcgacgcttccaagcgggccgttcgcaacggtcgaatgttgttttccgaaagcgaaaaaacaggggtgaacggctggatttcaaggataaatgcctctggcgctctgtccccctccatgagtagaatatcaagcagtgtatgtaaacgcctagaaggggcctttatttgcgttctaggtggtatcacctgcgtgaatgaccctcattggcgggaaaaatgcaggaaggaatctctgtggcagaccttgatgcggattcgctgaacgaatcagctgaaaacacgcaggaagatcagatccagaacgatcagctcgaagatgcgcagctcgatgacaccttggctccggagcattacgacgcttccgatctgagggttctggaaggccttgaggcggtgcgaatccgcccgggcatgtacatcggctccaccggcccccgaggcttgcaccacctggtgtacgagatcgtcgacaactccgtcgatgaggcgctggcaggctacgcttcgcacatcgaagtgacgattctgccggacggcggcgtgcgcgtggtggatgacggccgaggcattccggtcgacgaagtgccgggcgaaggcgtttccggcgtggaaaccgtgatgaccaagctgcatgccggcggcaagttcggtggtggcggctatgcggtttccggcggtctgcacggcgtgggcatctccgtggtgaacgcgctgtcgacccgcgtcgacatcgaagtgcgccgacagggcttccactggacccagacctacatcgaccagaagccgaccgcacgtcttgccaagggcgagccgatgggcgaagacgagtccaccggcacttccgtgaccttctgggcagacggcgcgatcttcgaaaccaccacctacgatttcgagaccctgcgcaaccgcttccagcagatggcgttcctcaacaaggggctgaaactgtccctgaccgatttgcgcgaaccggatcaggccggagacgaagtcgcgggcgaaagcgacgacaatgccgaaccgaagcatcagacggtcacctaccaatacaacgacggcatcaaggattatgtcgattacttggtgaagtcccgcaaggcaacccccgtcgaaccggacgtgatcgatttcgaagcggaagacctgaaaatcggcatttccgcggaaatcgccatgcaatggaccaccgcatactccgaagcggtgcacaccttcgccaacaccatctccaccaccgaaggcggcacccacgaagaaggcttccgcgccgcgctgacctcgctcgtcaaccgttacgcacgtgagaagaacatcctcaaagacaaggatgagaacctctccggcgacgacgtgcgtgaaggcctgaccgcagtggtgtcggtgaaactcactaccccgcagttcgaaggccagaccaagaccaagctcggcaattccgaagcgaaaaccttcgtacagcgtgtgatgaccgacaagctcggcgactggttcgattcgcatcctagcgaggccaagaacatcatccagaaggccattgaagcctcccgtgcgcgtcttgcagccaagaaggcacgtgagaatacccgccgtaagtcaatcttcgaatctgcgggcatgccagacaaactgaaggattgccagtccaacaatcctgaagaatgcgaactgttcatcgtggagggtgactccgcaggcggctccgcaattcagggacgcaacccgatcacgcaggccatcctgccgttgcgaggcaaaatcctcaacactgagcgtgcaagccttgaccgcatgatgaagtctgaaaccatcgaatcgctgatcaccgcggtcggcggcggttacggcgaggatttcgacctgaacaaagtccgctaccacaaggtcatcatcatggccgatgccgatgtggacggcgcgcatatcgcaaccctgaatctgacgctgttcttccgctacatgcgcccgatgatcaccgctggttacgtgtatgtggccatgccgccgctgtaccgactcaagtggaccaaaggcgcgcacgacttcgtgtacaccgacgccgaacgcgaccgcgtgctcgccgaaggcaaggccgccggccgtcagctgccgaagggcgaaggcatccagcgttacaagggtctgggtgaaatgagctaccaggaactgtgggaaaccaccatggatcctgaccaccgcattctgaagcaggtgcagatcgaagacgcggccgcagccgacgaaaccttctccatgctcatgggagacgaagtcgaacctcgccgcctgttcatccagcgcaacgcccgcaacgtcagctggatcgacgcgtagggatttcaaggacttcaggcaaggtttcataaggatttagaaggacttagaagttggcagacgaaaacaacagcaacgaagacggccagttcgtgcctgacggctccatggagccgttgagcccgcaggaggccgacaacaccgattacggcctgatggtgggcgaacgcatccagaagaaggatctgcagcaggaaatgcgcgattcatacctggcatacgccatgtccgtgatcgtggaccgtgcgctcccggacgtgcgcgacggcatgaagccggtgcatcgccgtgtgatctacgcgatgtacgacggcggctaccgccccgaccgcggctactccaagtgcgcccgcgtggtcggcgaagtgatgggtaagtaccatccgcacggcgattccgcgatctacgacacgttggtgcgtatggcacagtcgtggtcgatgcgttacacgctggtcgacggccaaggcaacttcggctcccccggtgacgatccggccgcggcaatgcgttacaccgaatgccgtatggctccgctcgccatggaaatggtgcgcgacatcgacaaagacaccgtcgatttcctgccgaactacgatggcaagacgcaggagccgaccgtgcttccggcacgattcccgaacctgttgtgcaatggttcgtctggcatcgccgtgggtatggccaccaacattcctccgcacaacatgcgtgaagtggccgaaggcgtgcattgggcgcttgaccacccggacgcaagccgcgaagagctgctcgaaaacctgatccgcatcatcaagggaccggacttccctactggtgcaacgattctcggacataagggcattgaacaggcctaccgtaccggccgtggtttgatcaccatgcgcgcggttgtgaacaccgaagagatcaagggccgtatgtgcctcgtgatcaccgaactgccgtatcaggtgaacccggaccgactggtcgtttccatccgcgaagcggtgcgtgacggcaagatccagggcatcgccgacatgcgtgacgaaacctccggccgtaccggacagcgtctcgtgctcgtgctcaagcgcgacgccgtgccgaaggttgtgctcaacaacctgtacaagcattcccagctgcagcagaccttcggtgccaacatgctggcgctggtcgatggagtgccacgtacgctgtctctggacgcgttcatccgccattgggtgggccaccagctggaagtcatcgcacgccgtaccgcctacctcaagcgtgaggcggaagagcgcgaccacattctgcagggctacctgaaggctcttgacatgatcgacgaggtcatcgcgctcattcgtgcttccgaatccgcggaaaccgcgcgcacgggccttatggacctgctggacgtggatgaagtgcaggccgacgccattctggccatgcagctgcgccgactggccgcattggaacgtcagaagatcctcgacgagcacaacgaactgatgcgtcgcatcgccgactacaacgacattctcgccaagccagagcgccagcgcaagatcgtgggcgacgagcttgacgaaatcgtgtccaagtatggcgacgaacgtcgaaccaagatcctgccgtactccggcgaaatgaacgtcgaagatctgatcgcggaagaaaacgtggtcgtaaccgttacacactccggtttcatcaagcgtaccaaggccgacgaataccgtgcgcagcatcgcggcggcaagggcatcaagggcgccaagctgcgcgaggacgacgtggtggaccacttcttcctcaccagcacgcacaactggctgctgttcttcaccaacaagggacgcgtgtaccgcctgaaggcgtacgagctgccggagggatcgcgcgattccaagggacagcatgtggccaacctgctgcagttcgggccggacgagacgatccagaccgtgctgtcgattccgaactacgaagtggccaagtatctggtgctcgccacccgttccggcaaggtcaagaagaccgcgctcgccgaatacgattccccgcgtcagggcggcctgatcgcagtgcgccttatgaccggcgagaacggcgagaacgccgacgagctgatcggtgccgcactgtgcaacgccgaggatgacatcattcttgtgtcgaagctgggcatgagcctgaagttccaggccaacgacgagcagctgcgcccgatgggccgtcagaccgcaggcgtgcagggcatgaagttccgcgaaggcgacgagctgctggccatggacgtggtctggggcgattccgacaaggatctgttcgtggtcaccaacgagggcttcgccaagcgcaccgccatcagcgaataccgtttgcaaggccgtaacggctttggcgtcaaggccgtgcagctcgccgaaggccgtggctccctcgtgggcgcggtgatcgttgaggaagatgaccagatcatggccatcatgaagtccggcaaggtcatccgttccaacgtcgacgaggtcaagcgcaccggccgcaccacccaaggtgtgacgttcgccaagccggacaagaacgacgagatcatctccatcgcacgcaacgaggagaaggatgacgaatccgcggaatctggcgaatctgcggaaaaaacggaatccgcggaatctgggacgaacgcaaccgtgaacgagggtgcttcggcatcgtctgaagccgctactgaagccaacgctggcaacggcgatggcgagaatgtagaggcatgaagacaagacaggcaatcgtctgcgaaaactggtagcctcagctaagaactgggcacaatcttgcaaggagcaacgatgagcgagaacatcgaaggacagcaaatgccggaggttgggcaggcaccgcgcgtggcacgttccgcttccagccagccgctgattggtgcggatcaggttcaggcgcacgagggtgcctcctccgcttccggcggtgtgaaggtccgtgagaagcgtcgcggcggcgctccgcgtgcacgccgtatgagcctgtctctgacgcgtatcgatgcatggtcggccgccaaggtggcgttcatgctttccatcgcgggaggcatcattcagattgttgcggtggctttgctgtggggcatgctgaacgtggtcggcgtgttcgaccaagttacgcagattgtgtcttccacaggcttggacgctggcggattcgacctgaccaacgtgttctcgttgggcactgtgctgagcgccgtcaccatcttctccattgtggaagtggtgctgatcaccgtgctcgtggtgattttcacgctgctgtacaacgtggtgagcaccctcgtcggcggcatccacgtcacgcttggagatgattaatagcgcagtgcgctattaatggcagcgagcggcgatagcgtccgcgagcgtcgcatgcaatgctgaaagcgcagtgcgccgtcagtagcggcgatagcaaactcaaacgcaacaagacggtctgtgtcgtgattcccatcacgacacagaccgtcttcgtattttctagaccattctgtctcttaccgtacgccaaaccctatctgcctctcccctgcctgcaatctgcccatatctgccctatatatggcagattttgccttccgcctgtaccatctcgcttatatatggcaggtcaacttgcaaaaaagccagttcgggggtatatgttgggtcatttttcctaccaaggctgccatatataagcgagatatcaccgtacgaactctcaaatctgccatatataagcgagatagcggagctgcgcgagaggaagttgcggttatagctgaaactattgcgatttttagagatagtttcagttataaccggaactatcgtgattttgagtgattgtttcaaatgtaactgcaactagattgggtgcgctgaagtatgtgttgaaatacgaaaagagggcctgtctggaatgaaaccagacaggccctcaatgtatttcgatgagccagccgtattggctagattggctaaaacggctagatcagagcacgccctgggcgaccatggcgttggcgaccttcacgaagccggcagcgttggcgccgagcatcagatcaccctcgtggccgtattccttggcggcttccagagagttggcgacgatgttctccatgatggacttgagcttgccgtcaacctcttcaaaagtccaggaaaggcggtaggagttctggctcatctcaaggccggaaaccgccacgccacccgcgttcgcggccttggcggggccatagagcacgttgttggcctggtagacggcgattgcctccggagtggaaggcatgttggcgccttcgcacaccacggtgcagtcgttggcgacgagagccttggcggattcctcgtcgatctcgttctgggtggcgcacggcagggcgatatcgcacggaacggtccacacgcccttgcagccctcgtgatattcggagcccggcacacgctcggcgtattccttgatgcggccgcggtggcccagcttgatgtccttgaccacgtcgagctgaatgccgttcggatcgtagatgtagccgttggaatcggaggcggtcacaaccttcgcgccgagggcctgagccttctcggtggcgaagatggccacgttgccggagccggagatgaccacggtcttgccttcgaaggaatcgttgcgcagcacgcgcattgcctcggcggtgtagtagcacaggccgtaaccggtggcttcggtacgagccagggagccgccgaattcgaggcccttgccggtcagcacgccggaatactcgtcgcggatgcgcttgtactggccgaacaggtagccgatctcgcggccgcccacgttgatatcaccggccgggacgtcggtgaactggccgatgtgacggcacagttccgtcatgaaggcctggcagaaacgcatgacttcggcgtcggacttgcccttcgggtcgaagtcggatccgcccttgccgccgcccatcggcaggctggtcagggagttcttcaggatctgctcgaagccgaggaacttgatgacgccttcgttcacgctcgggtggaagcgcagaccgcccttgtacgggccgatcgcggagttgaactggatgcggtaaccgcggttgacctgcaccttgccctcatcgtcggtccatgcgacgcggaacttcaccacgcgctccggctcgacgatgcgctcaagcacgcccgccttctcatattccggatgcttcgcaaccaccggctcgaggctttcgaaaacctcgcgaacggcctgcaggaactccggctggtcgccgtcgcgcttctcgacctgcgcatacacgcgcttgacgtactcgtcagtgagcatattcttccccttcgggatagttgggttaccaatagacggtctcattctatgtgcacgaatatggacggcacaagaccttgttcaggatttggagacgctttttgcgagtgctggttctgaacctgcttctttttacgggattgccgtgccttgtgttgcctataggatggaaatgcggaaagcgtgggagagagtacgtccgcaataacatctcacgatctcacataatgggagaatcatcatgattgaaggatttaagaaattcattgcacgcggcaacatgatcgacatggcggtcggtgtcgtcatgggcggtgccgtcaccacagtggttaactctattgtcaataatgtgattaatccgttcatcgccatgattttcggcaaaccgaatatggatggtctgctggcaatcacattcaataatgcgacggtttcgttcggcgcggtacttggcgcgatattgaatttcctgattatcgcggcggccgtgtatttctgcattctcgtgccgatcaacaaattccgtgacgtgaccgaggcgttgctcgccaaaatcaagcttgcggaagaacggagcaaagccgaggaggaagctgccaaagagccggaaatctccaccgaagagcagacgatcctgctgttgcagcaaatccgcgacgaacttgccaggcagaatgcacggaatacacagaacgtgccgaaccattccgacactgttgccggtgcagtcgcagtgcggtagtcatcgcaagcgatcgtaataatcaataatccaaggacgtttcaagcggtgacgcaagccccgcctgagacgtccttttgcaatggtctttcagcggggtgattcttccatgcgctggaataatacggactctggaaggtgcctcagcgggtcatatgttccagtgactggagggatctggactgtgaggtgcttggttgcgtctagttttctccagtgactggaggttttgggatgctgggaggcttgttggtgggaggattcctccactcggtggaggtttttggactgtgaggtgcttggttgcgtctagttttctccagtgactggaggaattgggatgctggtttggatttcggatttgggtatgaaaaaagggtttccagaaatcaccggaaaccctgattgtggagctaaggggattcgaacccctgaccctctccatgccatggagatgcgctaccagctgcgccatagccccgtggagctagccgggttcgaaccggcgaccctctgcttgcaaagcagatgcgctaccagctgcgctatagccccatagttgaaaaaaagcggccgcgccgctcttaatcaccgtgggcccgggaggacttgaacctccgacctcatccttatcagggatgcgctctaaccacctgagctacgggcccgttcctgctgcactgttaagcacaacgaattgaaataatacgcgaatttcagagaaagtcaatacaaggtgtgtcttcggcgtgtcgtgacataatgcagacatgccgaacaatcatcgtagccagcgtaacaatagtgggagagccagcaggggagtgcgcaaccgtaatcgcacgctatccgaagaaaccacgcaaatcgctggaatgacggtgaccatcgtgcgtaaagccatcaaaaacatgtacctgcgcatcaaaccgccgaacgcgcaaatcgtcatctccgcaccttctcgcatgtcgcaagcggcaatcgcacgatttgtgacggaacgcaaaccatggatcgaacgtgcgcgacgcaccatgctgcaagccaaggatgaacagatccgtcaaagcgatttcaatggtttggaccgtgtgaatggttcgcatggtccggataatctgaatggcctggaaaattcgggcggcgtgggcgatcgaaacaatccaggcgatcccaatagcttgaataatccgcgcgttttcgtgtggaacgacgcggcgaaggaacgggccgtacgggccatcaatgcgcaactgccggtgctgcttgcgaaatggtcgccgattatcgggcggaagccgacgcatgtcacgttacgcatcatgacgtcgcgatgggggtcatgcacgccgaaaaccggccgcatccgactcaacctgcaacttggtcttatggatcccagattcctggaatacgtgcttgtgcacgaaatgacgcacctgtgggaaaacgggcacggagaggactttcagcggcgtatgagcgcatatttgccgcaatggaggcaattgcggcgggagctgaaccgtcatgttgtgttgtgatgctcgcgatgctgttgcgttcgccgtcacgctgccatgctgcgatgagcttgcgtagggcgatgttgttgcgttgcctgtgatgttgaaatacttgcgatatcacgccactgccgtcacattgcgcggattgcaatgactagccacggcttacgcacgtttgataacgacgtataggtgattcgtatagctttttgttcataagatgtacagaacgcttaacatccgcgatttgcaagcctacaatcgtgacgactgaaacgtttgcgtgcaaacagtccacgcagaaagatcgaataagtgagggaggggtcgattgtggctgtattgagaaaagtcggcattatcggcatcggacacgtgggcgcgcatgtcgcaaatgccgtgctttccgcaggacttgccgaagaactgaagctgtgcgacatcaacgagcaaaaagtagtcagcgaatgtcaggatttaagtgacacgttgggtttctatccgcataactgcgtgatcggcaactacggcacgcaatacgagcagctagccgactgcgacgtggtaatcaacgctgccggcgacgtgaaaaccagcgccaaagatcgtgacggcgaactgttcgtcaccaccgacattgcacgcacctggatctcccgactgttcaacgcaggcttccacggtgtgatcatcaccatctcaaatccttgcgatgtggtcgcaaccgaaatctggcacatcaccggctacgatccgcgcaaaatcatcggaacgggaaccgcgttggattccgcacgactgcgcaacgccatcgcgaaacgcgtcaacgtggatcagaaatcaatcggcgcatatatgctgggggagcatggcaattcgcagttcgcctattggtcgaacgtgaacatcgcaggcaagccgcttgatcaactcgcacaagacgatccgcaacgattcgccctcgacaaggacgaaaccgagcaggacgcccgtcgaggcggataccgcgtgtacgccggcaaagagtgcacggaatacgctattgcagccactgcggcacgccttacgcaggctgtgctctgcgatgaacactatgcgaccgcctgctccacgctgcttaccggcgaacaaggcgaaagcggcaattacgccagcctgccgtgcatcatcggtgcgaacggcgttgaagaagtcctcaatcccacactcaccgaaagcgaacgggccaaattccatgcgtcctgcgagcatatccgcgccaatatcgcgcagcttgcatggtggaacgacgaatgccatcccacgctgcgcggctgaatctggattaaatctgcggatttaatcacagagcagacttgcgattactgatgttgattgtgtaaaaaatcagcatttcaataatcgcaagtctattttattttcgttttatttttgattatttcgtagctttcgcagcgtcgccgtcaacagtatgcttgcggatttccaacgtttcgatacgacggccatccacttgcgtgacggtcatgtcataaccgtcgtcggaaggcagcacgtcgccgatttcgcccatctttccagtatgcgccaggaaatagccggcaaccgtctcgtacggaccgtcttccagctcaataccggtcaaatcggcgaaatcctcaatcgtcatgccgccttcgatcgtggcgacgccattgacgaacgcggcacgctccgtgcgctcgccgcctttctcttccggcagatcatattcgtcgcgaatatcgccgaccagttcttcggtcatatcctccaacgtgacgatgccgtcggtgccgccatattcgtcgatgaccaccgccagatgaatgccgcgcttacgtagcagctcaaggcttggcagcagtttcgacgtgcccggcagcgaaatgccctcgcgcgtcacgtcggcaaccgtcttcgcctctggatcgcgaatgtcaagcaggtcgcgcacatgcacgaaaccaagcacatcgtcgaaatccttgccggtcaccggatagcgggaatacggcatttctcgcacatatgcggccgcctcctcaatcggcatatcgccatccaaaaaaaccacgtcggcacgcgggcgcatcacttcggccacgatcgtttcggacgcgtcgaacacgtcgtcgagaatcgtgcgctcatccttgctcaagttcgtattggtgttgacgagtacgcgcagctcctcgtcggacacttcgctgtcggtctcgttcggatcaaaaccaagcatgcgcacgataatgttcgtattcttgccgatcagccaaataatcggcttgcacaccttcgcaaacacgtgaatcgcgggcaccacggcacgcgcgatctgctcgttgcgctgcatggcgatacgcttcggcaccaactccgaaatcacgatcgagcagtacgaaatgatcaacgtcagcgcgatggtggtcaggggagcggccacgctcgtcggcacgccccaactttcgacgatcggcacaatatacggcgaaatcgaggattcgccgaacgatgcggaaagaaaaccgctcaacgtcacgccgatctgcacggtcgacagaaacgtgttcggatcgcgtgcgatttgtgcgacgcgctttccgcgggcatcctcctgttccatctggtcgatctgcgatccacgcaggctgaccaacgccagttcggtgccggcgaacaccgatccgagcaacagaaaaacgaaaatcaggagaatgttcaaacctagagacatggttccactctatcggggcggtatgtcaaagtgtctgtatctcctgattttcttggattttctcaattattcttagattgcttagcttcggattgttcttttttggatctctgttttgcaaatctccgttttccgaattgtaatccgtttcagaagctaagaacctcgactttgccggagtccagctggtaccttgcgccgacgatcatgagtttgtcggatgccagcgcctgctggatcgcttcggattgttccaccaagagttcgatggtgcgcgcgatgtgcacgcgttcgaaatcctcgctggattccaattccgactcgtgcgcctgccagattgagaaaccgacggtgcgcatcatgagcgaatccgaagcgcagatgcgttcgtcgatgtcggcaatgctgtcggcggccatcagcgaatcctcggcatcggcggtcagtttgtgcagtaacgcctcgtaatccttggaagcttgcttgatcgcaccgcaattctggtggccgagcaccaccagcaaacgtacgccgagcacggtcaccgcgtattccagggatgcaagcacggcttcgtcgatgatttgaccggccgtgcgaaccgtgaacaggtcgccaagaccggaatcgaaaataatatccgggcttacccgcgcgtcggagcagctcagtacggccgcttccggtgcgtgtgtgtctacaagtgctgcgcgtgcttcggcgccacgattcggatgttccggtttgccctccgcaaacctgcgattgcctgccagcatgcggctccatgcgccacttgccgtaccttcgacctcgttctggtctacaaacagttcgtctgccattgactccacccttcattgttcaggctagccaacatcatacgttttggtctgaccgttcgctgggaaatagagcgatatctcgcttatgtatggcagatttcgtgttctgtccggtgatatttcgcttatgtatggcagtcccaaaggtgaaaaaccggaaaaatgtacccccgaagtgggtttttcgcatgatggtctgccatatataagcgagaaggctcatgacaaggctccgattctgccatatataaggcagatataggtatgaaaaagggtccccgatcggcagtgcgaacggggaccctgaaagaaactggctacaatcagccggtgttctgcaggcctgctgcgacaccggacacggtgcacaggatcaggtaggtgtagttctccttctgtccgtgcgtgagctcttccttgtccacgcgcttgcgtagcgagccgagggcgagcacctgagtggcggacagcgcatccacgtacggcgagcggatgcggatggcctggccgagcacgtggcggtgctgcagaggccacttgtcgcctacgatctcgagcacccacttgcgggtgagctccatctcgtcgaggaccttcttgttgaggtcctcacggtctccgagggcaaggtacatcttggcgatgcgctcgtcagtcttggccagcgacatttcgatgttgtcgatgaacgtggagaacagaggccattcctcatacgcttgacgcaaggtgttcaaatcgccgaactgttcgcacgcggtgcccaggccgtaccatgcggccagattgatgcgtgcctgcgcccaggagaagatccacggaatggtacgcagatcgtcgagggacttggctccaaggccacgtttggccggacgggagccgatcggcagcaggccgatttcggtcagcggcgtgacggtggagaaccacggtgcgaagccgtcggtgttcagcaggtcgaggaagcggttatgcgcggcctcgtcgagcttgttggccatgtcggcgtacttggcggtcatgtccgtattgcgcttctccacgcttggagcggactgcagcagcgttgcagccgcaacggactcgacgtggcggatggccagtgccgggttgccgtagcgtgcgaagatgacctcgccctgctcagtgagcttgaagcggcactttacggagccgaccggctgtgcgagtacggcacggttagccgggccgccgccgcggccgacggcaccaccgcggccatggaacagggtcagatcgatgtcatgcgattccgcccacttggcgatgcgttcctgtgcggaatgcagggccagggttgcggaggtcgggccggcgtccttcgaggagtcggagtagccgagcatgacttccatcttgccgccggtggccttcagacgagcctggacctccggaatcttgatcatttcctcgagtacgtctaccgagttctgcagatcctcaagctgttcgaacagcgggatcacgtcgatggttggaacatccttgggatgggagaacgccagacggttcagctcgtacacgtccctgatgttttgggcgctcttggtgaaggagatgatgtaacgacgggcggccttgatgccgttgcgcttctggatggaaccaagggcgcggaaggtgtcgagcacctcgtgggtcatcggctgcagttcgccacgctcaccgtgcagaccatgttcgcggatatcctccagcgctcgggaatgcacgacggagtgctggcggaactccatctcgaccatatggaagccaaaggtctctgcctgccagatgaggtcctgcagcgggccgtaggcggaacgtttggcgttggcttcggcgagggagcgctgcacgaccttcaggtcggcgatgtaatcctcgcaggagtggtacatgagatcagcatcgcggtcgatggtggccttcagacgatcggccatgaccagcatgacggcacggtgcagctccttggtggagatcagtgcggccttgtcggtcaggcgctcgctcatttccttctgatggttccacaggctcttgagctcggcactcggcggagtggtctcagcttccatcgtcaggttcttgccaacgcggcgggtctcgatttgcaacgcgcccagcacgtggtcgctgaacttgcgggccacctgacggctcaccttggcggtgacattcgggttgccgtcacggtcggagccgatccagcttcccgggtggaagaacgccgggcataccggcggcacgaggccagccttatctccgaggatccaatcgtcgaaacgacggtacacctgtggaatggtatagaacaacgtattgtcgaaaatatcgagaatggtttcagattcctcaaccggagtcggcttcttcagtgcgatcggagaggtgcggaacagcgcgtcaatctcgttgaagagtcgacgggagttttccttcttgtctgaaccgccaagcagcttgtgcgttgcgagcagctgggagatgcgacggattttgccttccacggctttgcggcgggcttcagtcggatgcgcggtgaacaccggatggaactcgagctggtcgagcagttccttggctttggccggacccatttcgttaatgagctggtggtaggcgcaggtcatttcgttcactgggtcgacggcttgggtgtcatctacggcggcctcacggctgtgcagcacggagacacggtagttctcctcgcataggttggccagatggaagtaggtggtgaaggcgcgggccagcagttgtgcctcatgcacatccgttttatcgatgatgtcgacgaccttctgcaggtcatcctgattcggattcgtatccgtcagaatgccggagaagcgttcggcgctagcgttcagtgcgtgttcgcgcacttcatcgaacttggccagcagcttttcgtcgaattcgccgagcacctcgcgaagaatctgcaaacacagatccatttcctctttgagggaagcgggaagatcacgctcctcggggcctttggtgccggtgccggacgagacgatagctgcgtcggcaggcgtgatctgttcgttttctattgtcatcagacctccttctccaaaccatcgggttgcccggtctgtcggtccttcgcggcacctccgcgattgttttggccgtctgttgcgagcccacagccctaagttcggtcggtaatgcacgaccattgtatgcgcggcaaatcgacagtttggttacggaaataccgaaaatgtccgcatcgtggtccagtggtgtccacaaggtgaaatcgacggaaatttcgaaaatcctccgaccagcccacacgttagacctgaacttgtgagcgcacaatacgaacatgaacatgagacgaatttcgatagcgcggaaaaaagcgcttcggccgtcagcaaattccatacacactccattccgctcgatatggaagatatcgaacgggattgggacaagccggtcgctgaagcgggaatcgcagcaaaagccagcgtgatcgtacgcgtcggcatgctcgatctcggcgcgggcaccggaagcttccgcgtacgcgaaatgatgcaccgcatcgcctatccgctgggcgtgcacgtgcgcgccgacgtgaacctcaccgacatcgaagcctcctgcaccgacggcaaagaccgtatcaccgaagtcgtcgacctgccaaccaccggcgtcaacacggaacgcatttggctgctcgaacacttcgctgactggttcaacgtgaacctcggcaaaggatcgatgtaccacagccaatccgacgtgtccgaaggacttatgcagcatctcgacaagcgtgatgcgtcgcaggtgtcggctgacctgtcgaagcgtcttcgcgaacgtcagaaagccgaacagaatcaggagggatctgacgatcccgtgctcgacgcgcttgaaatggtgacggaacgcgccgaagtgaccgataccaccgcgcagccgttgcacttgcgtgatatcgaagcggcaagcgagcagcataatcgcggtgaacgtgaagccgaacgtgaaaccaagcgtgaaactgccggtacggccaacgttacgtcaagcgaatcgaccacgaaaaaagcgcgcaaaaatcgcaatcacaagccgccaaaaggtcaatacgccgaacatttcgaccacgtcggaaaagaagcggaccaatcgcaaggcatcaccgttcgccaagcccacgaacgactcgacatgatcgaacgacgcaaacccctgtattcgccggcgttcgcgggattcgcctcggcctgcgcctgcgcatccttcgtgttcctgcttggtggcggtcccttcgacatgatcggcgcgttcatcggcgcgggacttggccactggctgcgccgccgcctgttcgcccaccacctcaaccagttcttcgtgacgttcgtatgcgtggccgtcgcggcactcgcctgcacgggcaccctgcgattgattggtattttcgagcccgtcgcattgcagcatgatacggcttacatcggtgccatgctgtttgtgattcctggattcccgctgattacgggtggacttgatatggcgaaaattgattttccgtcaggtattcagcgcgttgcgtacgtgttgtgcattattttgatggcgacgctcgcaggctggatggtcgcttcgatcgtgcatttgaatccggaaggattcgagccgttgggactcaatccggttgtcaattgcctgttgcgtttcgtgttcgcattcatcggcgtctggggcttctccaccatgttcaactcgccgcagcgcatgtgccttgtcgccgccaccattggcgccattactgacaccttgcgtttggaaatcgttgacatgggcgttcccgccgaagccggcgcattcatcggcgcactgctcgcaggcctgcttgcctccgcatggcgttctgcggttcatcgcagctggctcgccccgcatctcggctacccgcgcatctgcctgaccgtgccgtccatcgtgatcatggttcccggtttgtacatgtatcaagccatgttccacctcggccaattcgacaccttgaacgccctcgactgggctttccgcgcgttcatggtgattatctgtctgccgatcggcctagccatggctcgcgttatcaccgataagtcttggagatacgatatttgatccgtttcggcatttgggtgcgtaaatgagataaatgcgattgtcgcaatgttcgaccggtacattgggacaatcgcatatttttttcagaagagattcgaaagaaattcgtttcgacagagatttgaagaaagagattcgaaagaaattcggctagcaatctaagaagagagaattcatggttaccaaagatttttgggtgctgctggcgatggtcatctattttgtggccatgctcaccatcggcttcatctactccaagcggtccaattcctccactcgtcagtatttcgcgggtggtcgaggcgttggtccatggctgacggcattgagcgccgaagcctccgatatgagcggctggctgctcatgggactgccgggcgtcgcctacttcaccggtgccgccgacccgctgtggacggccctcggcctggctctcggcacctacctcaactggaagctcgtcgcacgccgtttgcgccgctactccgtggtggcaggtgacgcgatcaccattccggacttcttctccaaacgattccatgacaaacgcaatatcgtctccaccatcgcggcgctgatcatcctcgtatttttctgtgtgtatgtcggtagctgcttcgtgacggtcggcaaacttttctcgaccctgttcggctgggactaccacctgaccatggtgatcggcgctgccatcgtgttcgcctacaccgtgatcggaggctatctttccgtggtcgtgaccgacttcatccaaggcttgctcatgttcttcgcgctggcagtggtgttcatcggttccgtcgcatccgtcggcggcgtcgacaacaccgtcgccttcctcaaaggcattccaggcttccttgacggcacgcaaatggccacgccgattctgaacgatgccggcgagcagattgtcaaggctggccaggccatgttcggcgcgcctaccgaatacggcgtgatcaccatgatttccatgcttgcgtggggtcttggctatttcggcatgccgcaggtgctcgtgcgattcctgtcaatccgcagttccgaagagatcaagaagtcccgtatcatcgccaccacgtggtgtgtggtgtcgctggcgtgcggcgtgtgcatcggtttggtcggccgtgcgatgatgccgacgcagttcgtcacgcagtccgcggcggagaacattttcatcgtggtttcgcaggcgctgctgccgagcttcatgtgcggcatcgtggtgtcgggcattttcgccgcgtccatgagttcgtcgtcgtcatacctgattatcggcgcttccgcggtcggtgagaatattttccgcggattgctctatcgcaaggccaccgatcgtcaggtgatgatggttgcgcgcatcacattgctggttatgttcattttcggcattgtggttgcgttcgatcagaattcgtcgattttccaggttgtttcgtatgcatgggccggtttgggcgcttcgttcggtccgctgatgctctgctcgctgtattggcgtcgtaccaataaattcggtgcgattgcgggcatgctttccggtactgcgaccgtgctgatctggcataatttcatcaagccgcttggtggtgtcttcgctatttacgagctgcttccggcgttcatcatctcgctgctgttcattgtggtggtgtcgctgctgactccggctcccgatgctgaagtgctgcacgagttcgatcattatcttgatgatcccgatgaccgcaaggtggatgacgatttggtcgcagcggaaatcgcttccggcgaaaagcgcgcgaaaatctaatcaaacataatgtggcacatgccactcaaacgcaacaaaggccggattgtgcaatacgcaatccggcctttgtcgatgctgaaacgctgtttaaagcgtgattatggtgtttctggagctttagtagcgcatgcccatggcgtcgcgcacctgctccaacgtttcgttggcgatggcgttggccttcttgttgccttcggcgagcacgtcgcgcacgtaatccatatccttggcgagttcctcgcgacgggcgcgatgcggctcaaggaagctgttcaccgattcgatcacatacgccttcagcgcgcccgcaccggaatcgccgatctcctcggcgatctccttcggatcgcgaccggtgaccaaaccggcggtcgtcagcagtgcggaaacctgcggacgtgcgatcggatcgaacgtgatgcggcgctcggaatcggtcggactcttcttgatgagcttggcggtctcctgcgctgtggcgcccaacatgatggaattgccgtacgacttgctcatcttgcggccatccaagcctggaatctccggcgcttcagacagaatcgcggccggctcggggaacaccggatgcttcttggcgtagcgttcgttgaaacgacgcgcgatggtgcgcgtgatctcgacatgcggcaggttatccttgccgatcggcaccacattggccttgcagaacagaatgtcgcatgcctgatgcaccggataagtcagcagcaggccggtcagcgcatggccggaagcttccatttccgacttcaccgtaggattgcgatgcagctcggcctcagtcaccaatgacaggaacggcagcatcagctggttctccgcaggaacggcggaatgcgtgaaaatcatggtcttttccggatcgatgccggcagccatgtagtcaagcaccaaattgagcacattgtcttcgatgtgcgcggtcgtgtcacgatcggtgatcacctgataatcggcgatgatgatattcgaattcacgccgcgattctgcatggcgacgcgctcacgaatcgaaccaaaataatggccgagatgcagacgtccggtcggacggtcgccggtcagcatggtgaacttgcctggattctgttcgattgcggcgagcgttgcgtcggaacgcttcttcgctgcgaggaagctcgcgctcatttcattgccgacagcggtgatctgctgctcctgggtttcgtccgtcatacgtgtccttttcttaagaaaatcagcgattttatcgtaaaagtctgagccgacaacgaaatatggcacagcaagtggtactctcttgtttgatgaattgatagcacagtaatcctcagggggtcagatgggccgcggacgtcagaaagccaaacagcagaaaatagcccgaaagctcaagtacctgaccaccgacaccgattatgatgagctcgccaaggagctcggtgcccaggagcctggttcgggttcttttgatcctttcgccgatatcgaagcaaaatattctcacgatgcggacgctgaagatgagatttctgaagatgctcaggagtccgcgcaaaccgacgccgaggatgacctcgacgagtatgcaaagtgggccgcagaggcggcggcgaaggccacgagcggagagttcccggcagccaagtccgccgcgccgaagccacacaagcccatcccgatgccgatgcccagcgcactgaagccgaagaagcaggactgatcggcatatcaggtactttgtgaaaccgcgatgcggatatgcctgccaggtgtatccacatcgcggttttgctatgcgtttttgcgcctgtgacggtcttctcgcagcctgtcacaccaacggcagcaagctactcaaatcgtcgcgttcgccaacggccgtgatgcgtcctgcctccttctcctcagcccagctggtgatgcccgtggcgagtctcatccacacgtccggttccagttcgatcacgtccggcggtgtgagattatgcggatcggatgccggtccgtcgagaatcttgatggcaccccacggcgcgacacgaacttccacgcccgccccgggcgcttttttctccagcagatgcagcgagtagcgcaccgccatcgcccacagctggcgtggcaatcgtggagagaattccagacggaaatcgcgggccgcgtcggtatttgcgggaatattgtcggcgatcatgcgatgagacgtttgcagccattgtgcaaatgcgtcatgccccttatgcagatcttgttctcgaataacagccatacgtgttattttgccgtttgcgagcgactatgatggggtgttgcagacaacgtagtcacaactgaataggggtgtgaagagagggaaaatacttgcgattcttgacagcgttcgcaatgttgttgcatgtcgtttgcatgttgctcgcaacgtttttgcagccggtttgcattatttctgcaaacgaatgcttgcttgtaattgcttgaaatttcatctttttatgattacgtagtatgctatgtatgagaacgtatgcatgatgttacttagtgttcatgcggccgctaatgcaaggacgctggggtaaggcataatgttcctggagagtaatccgtcaaagggagtcgattaatgactgaaattaccgcaccgaagtccgcggtcaccgcggagcagttcgcagacgagatccgcgagcagctgaagtacacccagggcgtcaccgtcgagcaggccaagccggccgacgtgtacgtcgccgcgtccgccgcagtgcgccgccacctcatggattcctggttcaagacccagtccgacatggtcaacggcaacaccaaggcagtcggctacctgtccgcagaattcctgatgggcaagcagctgcgcaacgcgctgctcaacgccggtctgaccgagcagttcgacgccgcggtcaaggaactcggcttctccgtgcaggacgtcgtcgacgccgagcacgagccgggcctcggcaacggtggcctcggccgtctggccgcctgcttcatcgattcgctcgcctcgctgggcgtgccggcattcggttatggcattcagtacaagtacggcatcttcgagcagaagttcgatgaaaacggcaagcagatcgaaaccccggactactggctgaccaatgaagagccgtggggacacatcgattacaaccgcgaccagaaggtttccttcggcggcgaagtcgttgaggaagatggcaagaaggtatggaagccggcttggtccgtgcgtgcggtgccggtcgactacatggttccgggctatgcctccggtcgtgtgaacaccctgcgtctgtggaccgccaagagctacgacgagttcgacctgctcaccttcaacaagtccgagtaccttgacgccgtcaagccgcaggttgaagctgagaacatctccaagatcctgtatccggaagattccaccccgcagggcaaggcactgcgtctcgagcagcagtacttcttcgtgtccgcctccatccacgacgccatccgcgtcttctacccgggtcaggacaagccggatctgaccaccttcgcggacaagatcaccttccagctcaacgacacccacccggtcatcggcattccggagctcatgcgcgtcctcatggacgagtacggctacgattgggacaccgcctggaccgtcaccaacaagaccttcaactacacctgccacaccctgcttccggaagccctggaagtgtggccgtccaagctcatcggcgaactcctgccgcgtcacctcgaaatcatcgagaagatccaggaccagttcgcagccgagctcaaggccaagggcgtcgacgaagccaccatcaaggacatggccatctacaccggcgactccgtgcgcatggcctacctggccacctacggcggctcccacgtcaacggcgttgccgagctgcactcccagctgctcaaggacgtcaccctgaagaacttctccgacgtgtatccggacaagttcaccaacgtgaccaacggcgtgacccctcgccgcttcgtcaagctcgccaacccgcgtctgtccgacctcatcaccgaaggcctcggcaccgacaagtgggtgagcgacctcgaactgctcaagggcctcgaaccgctcgcagccgatgacgaattcgtcaagaagttcgccgccgtcaagcaggccaacaaggttgacttctccaactacgccaagcgcgaatacggcttcgacatcgacccgaacaccatgatcaacaccatggtcaagcgtctgcacgaatacaagcgtcaggcactgaagatcctcgccgtgatcgcacgctacgccgacatcaagtccggcaaggtcgccgccgacgatgtcatgccgcgcaccatcgtgttcggcgccaaggccgctccgggctactacctcgccaagcagaccatccagctgatcaacaacgtcgcccgcgtcatcaacaacgacccggacgtcaagggcaagctgaacgtctacttcccgtggaactacaacgtgcgtctcgcacagcacctcatcccggcaaccgacctcgacgagcagatctcccaggccggcaaggaagcctccggtaccggcaacatgaagttcgctctcaacggcgccatgaccgtcggtaccctcgacggtgccaacgtcgaaatccgtgagcgcgtcggcgctgagaacttcttcctcttcggcatgaccgtcgacgaggtggacgccctctacgccgaaggctacgatccgaagaagtactacgaggccgatcctcgtctcaaagccgccatcgacatggtcgcggacggcaccttctccaacggcgacaagaccgtgtacgaagaccttgtccacgattggcttaccaaggactggttcatgaccctcgccgacttcggcgcctacaccgccatccagtcggaaatcgaggccctctacgcccagccgctcgaatggaaccgcaaggccctcatcaacgtggcgaactcgggctacttcagctccgaccgctcgatggaggattacctcgagcgcatttggatgaccggtccgctcaagtaatgacggagcgttatctgcgttgtggaaggcttgacgtatcttcgtacgctttcgccttccacgccttgtgatactgcgctcgtcattactttcgcttcgcacgggccatatgtgacgtgaattatcgcgtgatgtatgactcgtagcgttagatagggcgtgatgacgaagggacgattccgttttggaatcgtcccttttcgttttccagggcaaaacaaaaagccctgcgcgtggggcgcagggcttgaaagaaagagaaatcaggcagcttctggggtggtgggagcgacttcggcttcgccatcctcggcatccttggtcaggccaagatcgacaggagacgagctgttctcccatggctcctcccacggatcgtaatccggattctgctgcttgtacacatacagaccgacgacaccggcaagcaaagctccgaagagcagtgcgaagaacttccaaccgttagaagacttgttctccatgacggatcctttcccaaatatcggcgaacattggctgacctgctcgttcaagccaactctgttcactatattaattccttgaatgtgttgattgggtggatttacgcgccggggattcacaagaatgcaatcatttgcaatgatttcgcagattcgcggattcgcacgttccagtagggttgaaacatggcttatcaacgtttcagtctgtttcccgattccccgtcgttcaaagacttcttctctgcacgttccatgcgataccgttggcgtaacggcgatcctgtgatcaccgttacgatcatggcgatatgcgtcgcggtctggattgtcgaaacactattgaaaatcgtctggccgaccggctgcaacgcattcgtcggctcaggcgcattcatgcccgcgctggcgactcaccgcccatggaccttcattacgtcaatgttcctgcaccagccggcctccctatggcacattcttttcaacatgctgaccttgtggtgcgtcgggcctgtattggaacgcatgatggggcatctgccatatctcgcgttatacgtgctgtcaggactcggcggaagcgccggcatgatggtctggtcactgttctcgcaagacggttggctgacatccgcatacggcgcttccggcgcgctattcggcctgttcgcggcaattctggtggtataccagcgcattggcatcgacattcgatccatgctgatctggatgctcatcaacttcctgatgccaatcatcacgccgaacatcgcatggcaggcgcatgtcggcggattcatcatcggaggagtgttcacctggctgctggtttccggtctgcacgcgttgcgcggcaaaagtctgcagcagcgcacgctgatgtacggcgtaatcatgttggccgtgattattgcgattgtcgtcgcatgcaatatgagcaatccacttcgcgcaaacccccttcttggcatgttcttctagttggcaggcaggagaaaaaacagatttggggaatcgcagacacacacttatccacaaatgtggataagtgtgtggataagtgagggttgagctgtgggtaagtcggggataactcggtgcattatccacaaggatattcacaaaacggtggattccccggcttttcaacggtggaaaatgtggataacccgactatgcatagtggaaaaatggggaaaaacaccatcctatatattgtggacggtcataaaactgcctacaagatatagacgctatccacattcgtccacaataatccacgacttatccacatcgtgtgaaaccagaaaatccccagaatgacgacgaatcaacacaacgaaatcaggtacgtcaccaatgacaatcatgaatgacgagacgcgcgaattcgtggcgatgcatcgcaacgaggacgtgcgcgaactggcgttgaaggccaaacgtgtggaagggctcgacctgccgttggcgctcgaccagattgccggatggcagatcgcacgcaaaaaactgccacaatgggcctcctgcgagggaatcgtataccctccgcacatttccatggaacagtgctcatcgcagttcacagcccaatacaagtcagaaatcgcacaaacactgctcgcgccggccgcaaccgtgcgcgccagagtgtccgattctggagaatcggacaaccaaaccacgaaaagtgagccacagttgtccgattctgccgaatcggtcatgcaaacggcaaaaagtgcgttccagttgtccgattctccagaatcggacacgcaagagatgaaaatgggcgcgtggatgtccgattcgccagaatcggacacattggtggcgagaagttcgatggtggatctgacgggcggattcggcgtggacttctcgtatctggcgcgcggattcagccaagccacttatgtggaacggcagcggcatctgtgcgatctggccgaacacaatatggccgcactgggactcgaccaggcgcgtatcgtgtgcggcgacggcgtggaatacctcaggcagatgggtccggtggacttcatctaccttgatccggcccgccgcgacgagcatggatcgcgcacttacgcgatcgaggattgcacgccgaacgtgttcgaattgcgtgacctgttgctctccaaatcgcagtacacgctggtcaagctttcgccgatgttggattggcgcaaggcggtcgccgatttcgacgggaccgtacgcgaagtgcatatcgtggccaccggcaacgaatgcaaggaactgttgctggtattgggtcagcaggtgcatgaggaaccatccgcgccgcgcgtgttctgcgtgaacgacaatcagcggatcgactatgattccgccgcatatacgcagggcctgcgcattggcggcaaaccgctgccggaggtgaaaaactacttgtatgagccgaatgcgtcgattatgaaggccggttgcttcgatctggtggaggaacgattcggtgtgacgcaggtcggtccaagcagtcaccttttcgtgtcggcaacgccggttgccgattttcccggcagaggattcgcgattgaagcgatcggcggcatgaataaaaaggatataaaacgactgctgaatggcacgaaacaggccaatatcgcggtacgtaacttcccgcttaccgcaccgcagctacgcaagaaattgaagcttgccgacggtggtccggtctatctgttcggcactaccatgcaaggctgcgatcatgtgctgctgcgcacgtcgaaaatctgaaaaacaaaccggaatcgaaaaaagaaacaggcgaaccgggattggcaaggcaatcgcgaaagaccgcgtacgtttgcgaaagagcgtgaaatctacgaagaaaacctacgaaaagattgcgggataatcgtaaaagggcatgcgaaaagggcgtctgaccgcacgttgtacagacgccctcaaatcgcaggaaaggcgaaactacgctttagcgccaccacatggtcatgatgaatccgatcatgatgatcgcgaatgcgatggccagattccacgcgccgatgttcggaatcgggtagtcggaagtcaggtagtagacgaccgcccagatcagaccgatgatcatcagtgcgcagaacagcggcacgaaccagcgtggattggacttggtgcccttgatggtttcctccacgcggcgggtgttctccgcctgacggttcatcatgcgctgcatctgcgggctcagggagtccttatcggcggtagcgttcagcaccgcttcgacgcgatccatcggaatgtcgtgatcgtcatcgtcgtcggaatcagcggattcgtcagaagtggaatcgacggtggtttcctcagcggcatcctgaatggtttcgttgctctcttcaacggcagcggtgtcgtccgtggactgcagatcgttctgatcgtccgcggtggtttcgtgcagctcttcgtcagccatcagcatagtctcctttaataggctaaaagtcataatagtgggtagactcgaaagcggcgaactcacagcgtaaaactgttcataatcagagcaaatgcttaatgggaatcaggaaggtccgcatggcgaagcacaccggcaagcacaccgcgaaacggtcgaaagcggccggagtggcggcattccttgtgctcatgttctccggattcctgctcgccacgaatctgcgcgtgaaccgttccgtcgtggtgaccaacgacaccgccgaactcgtggaacaacgcgtgaaaaaagtcaactccctgcagacggaagtcgacgcgctcagctcccgcgtgaacgatctgagcaaaaccctgaacagccaggacgacgccgacccgcaagacagcgaaagcgccggcaacggcaccatgctgcccgcggtggaaggccccggactcgtggtgacgctcgacgattcaccactctgggaaaacctggtcgactccagcggatccacctccaacatcaacgattacgtggtgcatcagcaagacgtcgaagccgtggtgaacgcgctttgggcgggcggtgcggaatccatgatgatcatggaccagcgtgtgctgttcaattccgcagtgcgctgttccggcaacgttctgcttttgcagggcaaaaagtattcgccgccattcaccatttccgcgatcggcccggtcgagacaatgaaaaaggcgctcgacaattcgcaggaagtgaccatataccggcagtacgtcagcgcgttcggcttgggatggcaggtcgacgaaaaagaaaaactccatttcgacgcgaccgacgcattgcaacagccgctgcaatacgcgcaggcgatgaacaacgaaacagacggatcgcagcaaacggacgaaacgcaggaatcgcaagaggggaagtaaccgatgaagcacgtggcaccaaaacagcgtcgcaaaagcgtggtctggacgatacttggcatcctcgccgaactcatgctgaccgcggcggccgtctgcgcgctctacatcgcatggcaaatgtggtggacgggcgtgcaggccgaacacaaccaaatcgaaacacgccaatccgtatcatggtccgaccccggccaatccgacagcgtcaccattgcgcaagcgcaggaaggcgacccgccaacgcaaccgcaaagcgcacaggaaggcgagctcatcgcccaggtctacattccgcgattcggcagccaatggcagcgcaacctcgttgaaggcacctccctcaccgaactcaacaagcacggactcggccactacaaggattcgcaaatgcctggccaagtcggcaatttcgccttcgcagggcaccgcaacggctacggacagccactcggcgacgtcgacaaactgcaggaaggcgacccgatcatcgtgcgcacgcaggattactggtacgtctaccactacaccagctacaaaatcgtgctgccgaccgacatcgaagtggtcgccgccaaccccgaaaaccccggcgcgacgccaaccaaacgcatgctgaccatgaccacatgcgaaccgaaatactccacgccgacacaccgctggatcagctacgcggaattctcatactgggcgaaggtgtccgacggcatcccccaggagctcgcctccaccgactccaacggcaaagtcaaattcgtcaacaatgaaaaatcgtcgatcgtcgcatccgtcagctcactcaaaccgtggattctcggcgcgctcgccgcatatgcgatcatcttcctttccgcgctggtggcatggcgctggccgtatctcgccgacgtgcgcgcaggacgccgcgaaaagccggaattcagtttgtacggcggattgatgcgattgcagccgggtgtgcttccgattcgacttgtgctcatggcgttgctgattttcgcggcggccgcatcgtgctttgaatggctgttcccgtgggctgcgacgaatattccggcattgcaggaaatgtcgaattacacggccatataaagctgtattcaggtgccttccggcggtctgctggcagttttgctggcagatgtgaaagcgattgctgcgattgctgcgatctgcgattatcacgattgctgcgattgctgcgatctgcgattatcacgattgctgcgattgctgcgtgagacgcgcgccgcgtcacgacatgttgcgcacgtacactgctatgcaaacgcaaatattcgcgcaacgtaagtattcgaagcattcgaacgccgacattccgacgttgataggagcatgatgaccgattccgcacgcattttggtcgtggacaactacgattcgttcgtttacacgattgtcggctatttgaagacgttgggtgccgcggtgacggtggtgcgcaacgatgcgatcgatccgggcgaagccggtgtgatcgacgaatacgacggcgtgcttatttctcccggcccgggcgctccggccgattccggtgccagcgaaggcatgattcgcctgtgcgcggagcagtccaagcccatgttcggcgtgtgcctcggcatgcaggcgctggccgaagtgttcggcgcgaccgtaagccacgcgccgaccatcatgcacggcaaaaccagcttggtggagcatatcgacgacgagatcttcgaaggcgtcgccaatccgatgaccgccacccgctaccattcgctggccgtggagcccgattccgtgccggaagaactggtggtgaccgcgtggacgcagggcgaccacatcgtgcagggcatcaagcactgcagcaagccgatgtatgcggtgcagttccaccccgaatccgtgatgacgcaggacggctaccgtctgcttgcgaactggctgaaggtgtgcggccaggagaacgccgtggaacgttccaagggattgcagcccaaggtcgcggcctaaggtcgcagcaagaaagcgtgggaagcgcgaaaacgcatggtacaagcgtggaaacgtaagtcgcgcaatctcaatcgcaagaaaatacaaaaccgtaagaaaacacgaatcgcaaaagaacataagaccgtaatgaggaaggcccagctggcatttcagctgggccttccttgtgaatgatggcggttatctcgaccgatcagttgccttcgggagtgttgttgcctccgtcggtgttgccgccgttgccgccgttgttgccgccattattggtgctggacgacttcgtggtcaacgtgatcgtggctccgctgtcggactgggtgccggcggtcggtgacatgtttgtgaccgtgccatcctccgggccggaaaccgtgacctggaaaccgtagctttccaacaggctcttggcgttcgcatagcccatgccgaccacgctgggcacgctgatctgctgcttgccggtagacacccaaatcgtgaccgcggtaccggcctcgaccgtgcttccaacacccggctcgacgcgggtgacggcgccggaagcgatggaatcggaatattcgctttcgatggtgatctgcgtcagaccggcctgcttcagctgctcgataaccgtgtctttcggctgtccgatcagattgtcgggaatcttggtcatgccggacgaaatgtacagcgtgatgatcgtgcccttggtctgcttcgaattggcggcaggatccgtgcttaccaccttgtctttttcgatggaggcattgtcgaccgtgcgcacgttacccaccttgaagccggcggcctcaagaatggatttcgcgtcatcctggctcttgttcgacacatccggaacggcgaccgactgagggccggtggagaaccatacggaaaccgtggagcccttggcgaccttcttgccgcccgtcggattctgcttggtgatggtgcccttcggctcgctcgaatcggaatcctctcgggcatcgagcttcagacccttggccgcgagctgctcttcgacgcgcgcctcggaaatattcgccgtggcggtgaaatcaggaacttccaccatgtcggcggtggagtcgctcttgttcagcatgaagaacacacccagaatgaccagcagtgccaccagaccgcccaccacggagccgatgatgatctgcttcttcttacgcgccttagcggcctcggcacgctgttccgcgcgggtttttgtggatatgccgttctgtgggttcggcacggcctcgaactggcccgtaacgggattgaacgcctgcgtcgcggcggtttcaccggcaggagtcatggccacggtgttcgcgtccatttcggcctgcttgcgtgccttcatattggtcagatcggtcaacggattgaacgcggccgccatcggcacgccgccgttcatgaacgtcagcaaatcgttcttgaattcggaagccgtggcgtaacggttctgacgatccttcgccatcgccttcgcgcaaatcgaatcccacatcttcggcaagccgggaacgaccgaacttgggggagtggcgacctccgaaacatgctggtaggcgatcgcaaccgcggaatcgccggtaaacggcggccttccggtaagcatttcatacagcacgcagcctgcggaatacaggtcggaacgcatgtcgacgctttcgccgcgcgcctgctcgggagataggtattgcgcggtgccgaccacaccctgcgactgcgtcatcgtggcggcggaatcgtcgagcgcgcgggcgatgccgaagtccatgaccttgaccacgccctgctcggaaatcatgatgttgccgggcttgatgtcgcggtggatgatgcccatgcgatgcgaatactcaagcgcgttgagcacgcccatcatcacctgttcggcgtcgcgctggctcagagcgccattcactttgagaatgtcgcgcaaggtctggcccttgacatattccatcaccagatacggcagatgttcggtctggccggtttccgtggcgacgacctcttcgcccgaatcgtagatgttcacgatattcggattgttcatctgcgccacggaatgggcttcgcgacggaaacgctcaaggaagatcttgtcgttggcgaagtcggcgcgcatgatcttgaccgcgacggtacgcccaaggcgcgtatcgagcgccacgtgcacttcggccatgccgccacggccgaccagttggccgagctggtaacgtccaccagccaaagaggtaggcatgttgatgttcatccctgttccttcccatcagtgctcaaggagatatgaggtctgctgaccacgcgtcgcggaagccttccgcctgtaggcaccaccatcgtgtcagccaattgtgtctgctggtcgagcagacggcgttcgatgcgggacaacgtgcgcgacaccgtcaacgcgtccttcggacggtcaagcgggtctttggacagcatcgacatgacgaattcacgcagctgcacgtcgacggagtctggcagcggcggaaccggattgttgacatgtgctgcggcgatgtcgaccggcgtggcacccgtgaacggacgatgcccgcacaggccctcgtaggcgacgatgccaagcgaatagatatcggattgaggcgtggcatgctggccctgcgcctgctccggggaaatgtactgcgcggtgcccaccaccatgccgtcctgcgtaatctgctcctgattggtggagtaggagacgccgaaatcggtgattttcacctcgccggaatcggacaccatgatgttcgcaggtttcacgtcgcggtggatcacgccatgcgaatgcgcgacgaacaggccacgcgcggtctggatgagaatcggcagcagacgggtcggttccatcgggccgttctgctcgtggaacaggtcggccagcgacttgctgggcacgtactccataacgaggaagccgatgccgtcatgttcgtaatattcgaacaacgcagcgatattcgggtgtgcaagattggcggaattatgcgcttccgcacgcaggcgaagcagcttggcctcctgcgtgacgcccaagtcgccgcgcaacgccttaatggccacgggacgacccaactggatatcatagcctttccacacttcgcccatgccaccctgggccagacgggcatccaacctgtagcgtcggtggatgagctgtccttcaatcagtttcactctgccagcgcctcctgcatcatcgccttcataattggacccgccgcgaacgagccatacaaatccacattgtgcaccaccacggcaactgcgatcttcggatcgtccgccggggcgaagccgaccacccagccgtcgatggacgtattgccgtcaccgatctgcgcggtaccggttttcgcagccacctgcacgccgtcgatggccagattcgggttctccttggtgaccaccgcctccatcatctgcgtgagcttgttggcggtgcccgaactgaacgcgcggctcatcacctgcggcttggtctgcgaaataacagacaggtcggaggaacgcacgcgatccaccagcgtcggctgcatgaccttgcccccgttcgccacggcggccgccaccagcgcgttctgcagcggagtcaccacggtgtctccttggccgatggacgccaaagcgagcttgtcgtcggtcgtgtcggtcgggaacttcgacgccacgctcatccacggcgtgcccgtggaatcggatccgtcaaccgtgatcggactgtcgaaaccaagcttcttggccatggacgacaccttgtcatcgcccaaagccacgcccagctgggcgaacgcggtgttcgacgaatacgccatcgcgtcttccaacgtgatcttgccgtccgaaccgtcggcctgcgacaccgcgttcgtcaactgcgtgaccgtgcccggaagcgtgtagctcgatccggccggaatctcggtgtcggtctggtattcgccggtttccagcgcggccgccgccaccaccgttttgaacgtggatcccggaggatacagctgcgaggtggcacggttgagcatcggattcgactcgtcttgcgaaagcgtggaataattgccgttcgcttcggacgtgtcgtggctcgccagctggttcgggtcgtagcttggcgtgcttgccatggcgagaatacgaccggttttcacttcgatggccacggccgcgccgtcattgttggcaagaccgttgtaggcggcctgctggattttcggatcaatggacgtttcgatggtcgcgcccttgttttcctggccggtgaacagcgatttgaaccgctgccataccagctggtcggattggcccgacagcagcgagctgcgcgacgcttcgataccgctccagccgcgttggctgatcgagaagaagccggtgaccggcgcgtacagttcgccggcggtataggaacgctggtaggagaacgcgtcgttcgaagggtcggatttggcgatgacggagccgtccgaagcgaggatcgcaccgcgcggagcgccatactcgtggtagagggcgcgggtgttgcgcgggtcgttgttgagttggttcgcgcgaatcgccgtgatgatggtggtggacatgcccaggatgacgaacagcgccaccacgatggtgaagagttggcggagtgacttattcatgcttggctcccctctgacatgctgtccgatacgttcggcgtgcccgatgggggagcgggtggtacgactggcgtgcctgaaaccggcgtctccgtggagatgatttcagtggcctgcgattgcgcggaggcgacgcttctgcgggcgcggctctgcttgcgggcgcgcagcgcctgcatcgcctcatattggaacgtgtcgctatcgatatcggattcgggtttgttcgccgagttggaaatcaccactaggagtgctgccaacatgtaattcgctatgagtgaggatccgccggcggccatgtacggaagagtcaaacccgtaagcgggatgactaacgtgatgcctcccaccacggtgaacacctggaaggccatggtgaacacgaggcccgatgcgagaagcttgccgaacccatccttgattttcatcgcagtgatcatcccggcggcgatgatgagcagatagagcatcagaatggccatcagaccggtgaggcccagctcttcgccaagtgccgcgtagatgtagtcggagttggcgatcggagtgagcgacgggtgaccttgcccaaggccggtgcccatcaagccgcctgatgccaggccgaaaatacccgtgacgagctggtaggatccgccgtactccttgttgtactgcgccgagtcgaacgggtgcagccaggcgtcgacgcgcgcgccgacatggctgaaaatattggccgcggcgaacgcgcccacggcaaacgcgatgaaaccaatcacaatccaactggtgcgccccgtggccacgtacaacatggacacgaacatggcgaagaacatcaacgacgtgcccaaatcatgctgcacgaccagcacgcccatcgacacgatccacaccacgatgataggcccaagatccttgatgcgcggcagctgcaggcccagcaccttcttgccgccgaccgccagctggtcgcggtggtcatacaggtaggaggcgaagaaaaacgcgaggaacagcttcgcgaactcgcttggctggaacgatcccaaaccgggaatcttcacccaaatgcgcgcgccgtactgttcggaaccgatcaccggaagcatcggtgacagcagcaacaccaaaccgatcaccatgctgacgtacgagaaccgcctcagcacacggtaatccttcatgaagatcaccagcagattcgccaaaaccagcgctatcgacagccaaagcaactgtttgaacgcgacggacgtgttcgaatcctggtcgatgcgggcgatcatcatgatgccggtgccagtcagcaccatcacacaacacataatcgcctggttggcatacggctggaaacgcagcggcaatccccaggaagtcaggaacaacgcgccgacaaaagcgagcatccacaaataattctgcggaaaaccgccggtggtgcgttcgaacatctggaagaacgcgacgccgcaaatcagcatgctgaacagcagcaggccgaattgcttcagacgggttgccatcatgactggtcaccgcctgacttgtttgccgaagcgtcgtccgatttgtctgatttgcccgacgacttgtcggaagtcgtaccagaggatttgttgtcggattcgccgtttgccttatcttgttccttctgcgcggcttcgtcctgctgttgcttcagctgctttttgatcagtcgcgtatgcgttttcgcctcgccgtaagtgtcgaaggaaatgccctgcgcaagctgttcctgccagcttggcggcagttcgctcgtcttcatatgggtgtcggtgacggcgtgcgacagctggaagccgaacaggcttgtcggcacgccttggaaaatcgccacttcgccgttgtcgtcgccgatgtagtacttggtttggctccaacggtaggttgcgaacgcgccgcccgccagtcccagcagtaccacgatggtgacgatgatggcgatcacacggttgcgtcgggtgcgcgtgcgcttcgttttgcgctgctcgatatgctcgttgcggatggctttggcgacttccggatcgttcggatcggcggaaatgcggccgtcgtccttctgtacgacggggatttcaccggtgtcgggattggtgcggtcgccgttctcctcccgtaccgtggacggttgcgccacgcgctgttccggaggattgtcgtcctcgttgggattcttgccgttgcgcagtgcggcggcacgggcggccggcgacttcttgccctcgcgcagtgcgggagcggatgcgaccggctcgttgatgatgtcggcgatcggttcaaggcttgcgctggccgcgccgccaaccaacggcgtctgatgcggcaggtcgaacgcgtccgcgtcaagggcgagcgtcgcgtcggcgatgaccgcggtgacgttgtcggtgctgccggcacgaagcgccatcgaaaccagctgttgcgcgcactcctcctgatcggagcaggcggacagcacctcctgcaacgtggaatcctcaagcacgccgcacaagccgtcggagcatagcagccagcggtcggacggatgcgccttgcgcacggcgatgtccgggcgcgaatcgatatcgaaatcacccagaacgcgcatcacgacgttgcgctgcggatggttgcgcgcctcggcctcgctgatgcggccggtgtcgatcagatgctgcacgtagctgtggtcggacgtcatgcggatcagacggccgtcatgcagcagatatgcgcgggaatcgccgatatgcgccaaaacccaatatccggccaccaatgcgaccgacgtgacggtggtgcccatgcccgcgagacgacgttcgcgcttcgctttgccaacgatcgcgtcatgcgcggccataaccgaggtttccatcatgtgggcgataatctggacatcgccctgcacgttgtcttgctcgatatgcgccaatgaacggatggcgatggtggaggcggtgtcgcctcccgcatggcctcccatgccatcgcagatggcgatcagatgctcgccggcgaacgcggaatcctggttgttggaacgtacggtacccacatcggaaacgacggtggaatacatgaacagcggttgtgaagcgggagaagtcggcaaacgggtcacctcaattcaaaggtggttgcgccaatgcgtacgggaacgcgcgatccgagaatcatcggagcgttcagacgctgctggttgaccacagtgccgttggtggaacccaggtcttcgatggcccacttgccggtggcgggatccgtatagacgcgcgcatggtgggacgagacgaattcgtcgtccaaaaccacggtgttcgaagcggaacggccaagcgtgatggtgttgccggacaaagggacggaactgccggcaagggggccatcgatgatgaccagcaaggtgggtttggcgcttgatgtggcgctgacgactggtgccggggcggccacgggcgcgggcgcttcgacggccttgcgcgcgcgacgctccttacggcgatgagcccgcgacttgcgcgggctgagcgtttccacatccctgtacagcgaacgcaccgtacaggccacgaagatccagagcagtacgaggaagccgtacttgaggatcgcgaaagtaagttcagtgagcatagaggcaactcccgaggttggggttggttactcctgatcctgcgaagaggcccaatacaggattcgggtgcggccgatggtgatcgtgttgccgtcgagcaacgtggccgcctcgacatgatggccctcgacatacatgccgttggtggagcccagatcgcgtgcgatgacggtgttgccgttgtcggtgatgtcgatctgcatgtggcggcgggagatgcccggatcgtcgatcacgatatcgcagtcggatccgcggccgatgatggtcttgttttccgtgagcagatactggtgctcgccgatttccagcatcgggcagtcttcggtctgcgcgtcggtggtgacgggcacggtattgccttgcacggattcgctcgtcagcttgaaattgctcttggtgaggtcaaggtcctcttcgaagatcaccacgaccggaccgacgaacgcgtaatgctggtccttcgcgtactgggtgaggttgtcggccagctcattggccaacgcttccgcgccccattcgacgatgttgttgaaatccggcgtgctcagcttgaaacggtactcattcggcgccacggtacggtctcgcgtgacgggcatggcctctttgtcaatctcacgttccagagcgctggaaaggtcgacgggctgcaggtccttggacccgaacttggcgaaaaccccgttgacggcgccttccacgcttttctcaaatcggtcgagaacactcatgcttgtccctttctatcctcacccatcctacgcggtagagcgccgagcgccaattcgtaagtcctttaattgcaaaaatttcatgcaatatttcggtctttataccatctagggggtatatggttctgggtttgtctccataatctcgattcccacgctgtgcgatggatgtctgtggaaaagggagatatggaatggtgataggttgggaatatgacagatgcgattcgacagttcccccgtaaaaaagcacgtaccttgcgattctcctgcggtgcgccacgttcggcccgcgcgattgcagatggctctcgcgtgctgttcctgcgttccgacggtccggaagataccgtcacctcgctgtggatgagcgcgatcgacgaaaacggccacgccagcgaaacgctgctcgccgatccacgcacgctgctcgccgatgccgacgccgaagacgttcctgctgaagaacgggcgcgtcgcgaacgtgcgcgcgaaggcggttccggaatcgtcggctattccaccgacgcaagcggcaaccgcgtgaccttcactatcagcgggcagcttttcctcaccgaccttacggcgggcgcgacgcgagccatcacgatagaggaagatgaactcaaaccggtgctgaacccgcgcatcagtcccgacggacggcacatcatgtacaccaccggcacgtatctggtggacgtggatctcgccgacgatgaagaaaccggcgacgcgatttcggtggtcgcctcggcaccgcagaacggcgaatggaaaatcggattggcggaattcgccgcaggcgaagaaatggaccgctacgacggcttctggtggtcacccgactccaaatacgtgctcttcgaaacctacgacgaatcccccgaaccgatctggcatctgtcggaccccgcgaatccaaccaatccggcgcaagccaaccgctatccgcaagcgttgaccgccaatgccgacgtgcggctgaccctgctggaactcggctacgacagcgacaactgctgctacggggcaatcgccaacgaagtgcagtgggaccatgaatcctacgaatatctggccgccgtaagctggcgtgaaggccacgatccgatcatccttgtgcaagaccgcctccagcagcacgatcaggtgctcgccatccatgtaggcgagccgatcgccaccatgcgtgacgcggaaaacggcttcaccgacgacaatggcgacgaggtcgaaaccttctccatagccattcccgaatacgcggaaggagaacgccccggcaccacgcgcgtgcttgaggaacacggcaacgactactggctcgacctcatccacggcacccctgcattcactccggatggacgcttgatctgcgcgatgaacgacatggacgtcgatacgaaccgactcaccgttgatggtacgcccttcactccggccggactgcaggtgcgcgaagtgctcgacgtgaccgacgacgacgtgctgtgcgtggtgcagcgcacccctgaaatcctgcctgaaagcgacctgccgttcctctggcagtcgaatgcctccgaccatgacgcccgcagcttcgacgtggtgtcgatccgctatgacggcacatgggaacccctcacctacgcgcccggccagtggagcatgtctcgcgccggcaacggctgcgtggtgaccggacggggcatggacgacgcaaccgtgcaaatgcagcattgcatgaacatcgccacaaccgacgaaaatggtacggacgtggcgtcaatggtggtcgcaccaatcgaaaaccatgccgaaacccccggattcacgccgaacgtgcacttcacccgactcggcgaacgtgagctgtacacggcgatcgtgctgccctcatccgatagtgaatacgcgcacgaagccatcctgccggtactcatgaaaccctacggaggccccggcttccaacaggtcatcgaaagtcaatccttctattgggacgcgcaatggtgggccgaccagggctacatcgtggtcaccaccgacggacgcggcaccaccggacgcggcccgcaatgggaccgcgccatctacgaaaccatgaaatccgtaacgctcgaagaccagattgacgccgtgcgcgcgctgccggaagcgttggaagcgctggctggcgagaatgcggcagccaacgttccgcaacccgatctcagccgcgtcgccatgatcggctggtcgtacggcggattcctctccgcgctcgccgtgttggaggcgccggaaacgttcgccgcggcctgcgcgggcgcgcctccgaccgactggacgttgtacgatacgcattacaccgaacgctatctcggccttgactcggccgtgtacgaacgcaacagcatcatcgccgacgcgccgcagcttgatcgcccgctcatgctcatccacgggttcgccgacgacaatgtgacgatcgcgcacagcctacgcctgagccaggcgctgatggcaaccggacgtaagcacacgttcctgccgctgaccggcatcacgcacatgaccaacgacgagacggttgccgaaaatctgctgatcctgcagcgcgatttccttgcggaagcgttggggtgacggcactgtgacgacagtgcagtaacggtaacggcaacatcgcaaacgaaagtgttgcaaagcgccgtaggaagacaaaacgcgttcccctgcgactcccggactgccaagtatccgaacgtcgtgggcgaacgcgctcccttctcgaatgccaacataaaacaggcgaaaacgacttcgcaagcgagggggtaccacatttgtgtaccccccccctaacaaaatctgggcttgaaaaagacggaaatcggtggatcgggctcgtcctaaccctgatccgcagctatggtcaaacctgcacttgttcaagcaaaccgggcgaatcgtcgatgacggtcaccggaatgtacgcaaacaacgtccaactaccgtcctgcgcagacgtggtgagcgtgccctgatacgattcgagctgcttcttgaacgaggcgagcccgtggccgcccggtagttcgtcatcgcgctcgtcagctccagccatgtcctctttcatgggattgatttgcgtgatttcgatggcatttggccggagcatcaccgaaagatcgaccttgcttccaggagcggcatggcgtgcgatattcgcatagacctcgcgcagcagattattggcaagttcggcgattgcttgcgatgcgctcggcttgccgcccgcgcagtgccggatggacgtgatattgaagccaagcttgcgcaagcgacgatcgccgtcatccagtgttgctcgcagcagattggccaacgcttcgccgtcggcgtcgccggggagagtggtggcgtccatattcaattcgtcgatgacgcgatgcacgttcgtcaatgcggaaagaatatattcgttgatttgacgccagtcttcggcatcggctgttgtggttgccgtagttgtggttgcgttggcagagtcagcagcgacgccagggccgctagagttgccaccgatatgccgttgcgccacaaacgccgccgctgacaaatcgcccgtcaccgcatcgtgaatggcatcggcaatgcgtgcgcggctttccaattcctgcagacgattcttgttctgcgccgcttcgaagcttttctgcgttgttttttcgctccaactcaacgcccgaccaagcagtagcaccatggcatacatgctgaccatggcgacggggttggtatttggcccaggggggtcaatcagcagaatgttaacaacgtaatatgtgagtaacgttgccgcgataatggcattagtgctgtatgcgagcatgccataggcgtaaagctgcgcgggaagagaatttcccaaatgcgcgtagggagtaaacagatcgcctatggaggcaatcacgagaatcgccaccgatgtacttttcagaaacagcggagacggtacgagcgccgtaaccagcatcgcaacccatatcacgccaaatatgtcggtaggaggctcgtagcaaacgccgtatatggtccatgcaagcacgatcagcataatggcgaaacggattggatgccacaggttcggatgctgcgtgcgcatacggttgcgccacgcaatgtactgagttgcgggtttagagcgcattggacctcacccacagtgccactgcctgacgcgaggtcttgcagttaagttttcttaaaatactttgcatatgtttgcggatggtggcttcggaaatccccaaacgctcggcgatgtcccggtcaagcatgccctccgcgcacaaggaaataatctgctcctcacgaacggtaagcgcgggagtggtctcagcctccctgctgatacgcagattggccaacgcaggcggctcaaatccctccatcacctcgccattgcacatacgcataataatctgcgccaactggtcggcattctccttaccaaccaacccttgcgcaccagcctcaaccagcttgtcccgataactattgatggaaaaactggttgcaccgagaatcggcatgcgctggcccatcaaacgcaaccgacgacacgtggcggggccttgcaatccctccatcgacatatcgagaatcaataagctgacatggccgttcgcatcctggcaacgttctatcgcctcacagcctgaagtcgccgtccacaccacatacgcggtcggcactttgctggcaatgacggcactgagcgaatccagcgctcgcggatcattgtcgaccagcgcgatgcggtgaatcttgggatgcttttcccgcgtggacatcatgcgattactttccttttccgcacagccactgcagccatgttgggcagttggaatcgttggcagcggagatatcaccgttgttgtcaacgggagttgccgccgcgtgcgcatacgttggtgtgccggtgagagacagcgttaccaccatcagcagtgaaacgaacttcatacctccatagtatgcgaggatggcgcgcgggggtgacgattcggttgttccggtacgccgttgatgcactgacgcatcgttatacagcgcgcatgcctgtgcttagtttcgtcttggcgccgttcgcctaagatggaactatgactatcacgctcatcgacgaggcgcgctatgacgccgaaatggacgctacggtgctgcctgcgctgcaggcttgcatgacggaaggttggatggaaccggccaccgtcgattgggaaggcaaggcgttgcccaagttggagcgccccggccggttgcattactaccgctacgacgcgcgcacattcgacgcgttgcgcgaggaaggcgcttcgggcgtatttcgtggcgcgatcgtcatttcgcacggattcaccgaattcggacgcaaatacagcgaaatggtgtggtactttctgttggccggctattcggtgtgcgtgttcgagcatcgcgggcatggccattccgcgcacgatatgagcaatccaagtttggtatggattgacgattggcggcgatatgtggccgatttcgccacgtttgcacagactgtggggcgtgaggcggcggatggtggcccaatgtacctgtactgccattccatgggcggcggtatcggcgcggccgcgctggaacgttacccgtcgctgttcgacaaggcggtgctgtccgcgccgatgatcgcgccgctggtcggcatgccgacgtgggtcgcacgcattgtggtcggcgtaatctgcgggcttggcttcggcaaatcacgcgtgttcggtcataccgatttcgacggaaacctcaatctcgacgattacgagggagcctccgaggcacgcatccgctggttccacaagcaacgtttggcggacgtgacgtgccagaccaacgctgccactttcgattgggcaaaccaggcgatggcgctttcccgagccgtgctcagacccgacatgtgtggagctatcgaagccccggtattgctgtttcaagccggacgcgacgtgtgggtgctcaacggaccacaagatgacttcgtcgaacgtgtgcgagaaggcggcggttccatcgaaaaagtgcgatacagccagtcattacacgaaattttttccatgccgaatgccgtgctcggatcatatctcggcaaaatcctcgattttttgtcagcgccgaacgcaagcttggcggaataaatctgttttgcataactgacgtttaatatgcgtaccgtgtgcgttacaatcgccgtgaatttgccgtgaaagccgtggagagagcgagggcagtccgtggcaaagcaaacgtcgggacaggcgtcgcaatcgcagaaaacttccgaatcgcaaaaaaccgcgaaaaaaaccgcgaaaaaaacggaacatgtgctggaacagacgccgaaaagcctgcttatcggcactggcatgacattgctgggcggtgccatgtggggtatgaacagcaccgtggccaaactgctgatgcgcgactaccagctggatccgatctggctttcctgcgtacgcgcgctattcgccagcctgatcttcctggtcggatcggccatcaccacaccgcagaaactcgccggagcggtcaaagacgtcaaatcgtatccgaaatatttggtcaccacactgatctgcgtgcttctggtgcaggtctcctacctgatgaccatcgactggacgaactccggaaccgccaccgtattgcagacgctcaacctgattttcgtgctcgcctgggtatgcctgcgcggcaaacgactgcccctcaagcgtgaattggtcggcgtgctcctggcgttcgcaggcacgttcctcatcgccaccggtggcaacttcgcctcgctgtcgctgccatggcaggggctcgcatggggactggttgacgcggtgagcaccgcggccatgtccattctgccggtcgtgctcatgctcaaatggggcaacatgaccatcaacggcatcacattcctcatgtccggactcattctatgcccgttcgcgcaaccgtgggcgaacattcccgcactggacgtgcgaggcgtgcttctgctgctctacaccatcgtatgcggtacattccttgcgttctggctctacatggccggcgtgatgcgcgtcggcgcggtgcgtgccaccatgctcggcaccagcgagccggtcatggccaccgtcaccgcagtggcctgggccggcgaagcgttcaccttcaccgacctgaccggcttcgccatgatcatcatcatggtcttcctggtgcgctgacctaccctgttccgccttcccctcgcgccttagttgtccgattctgcagaatcggacaaccagaacgcaaaacccataccttggttgtccgattcaccagaaacggacaaccaaacaggtacaactgccccacagttgtccgtttctcccgaatcggacaaccagggcataaaaaatgtgccgcggatgaccgattctgcagaatcagacatgcacggcacaggagagggaagcactacttggcatacacggagaagcgctcgcccacgtgcgcggcctgctcagcctcattcaccacggcgatcgcgtaatccgcgtagctgatgtagctctgcccggcggcattgacggtgaactcctcaccggtgagtccgtactccgtgcaatccgccgaaacaaccaatgacagatgaaagggattcggcatcctggagcattcctgccggaaatgtcgggagccgctgagctctactatcactggtgaaacgaaaaggccagaacctttcggctccggcctttcaccatggtgcgagcggggggagttgaaaccgtggctatgacatcatgtaagtttgccatgtcggaagacaattgaaatttcaacatttttgatgtgtgcaagacctccgcagtctctaggagtcactcacgtttgttgtcaaatggttgtcagccgcatggaggttcgtgcccccacagaatacgagcgattccagactcgctcgtatggggtttgtgggtgcaggttcgcatatgaatcaactgctatggacgtatggaagcaagatgctgccgccccaaaagccctccgcttcgctccggtctgcttttgggttgcctagaaacgacccatgatccatatcgtgttgcatctgactgtggctagatcaggcgtgaaagtcggggcaaagcctgtgcaacagacctcataacccttgaaattattagatttaattgtaaagaacgaaatataacacttgtaacagttatgccatgttgggtgttatattcagaatcctttgtttttcaagggctttcaaagcaaaataacacatataacactaataacacatatgttgggtacctaattttatctgacagatttaaggtaggcgttgaaattggaggtgactctttccgtttcagcgcttgtgaggtttgcgtacacatcaagcgtcattgtggccgaggaatgtccaagcatgcgttgaacacccaaaggagaagctgtctgcgctatgagcagtgacgctgcagtatggcgaagatcgtggactcttacaagcggtacgcccgccttcctcaaggcggtggaataccagctggtgtgatgcttggcgatgctttgctggcggcagtagtggccgtccggatcggtgaacaccaaatcattcgggcttttcccctttatgtgcgttctcagagcctcggcgacgatgtcgaacattggcacttgacgacttttgtagttcttggtcctctcctcgactatgatctcgctgccgaccttggtggcggtcctgcccacttcaatccgcatggtgtcaaagtctatgtccttgaccagcaatcccgtggcttcggcccatcgaagcccctcaaacgccaagaccaggatcagggcgcgtctattgtccccggcggcgtctgctaggcgtagaacctgttccgctgttaatataggtcgctcccgcgtgaccttcttgggaagctctatgttgtcgctgggattctctcgtatgagattgtcgttcacggccaattcgaaaatgcccctaaggatgccgaaggctctgaacacgaccgtgggcgatcgctcctcggcaagagagctcacccatacctgtatttcggaatggcgtatctctcccactctccgctgtccccatttcgatgcgacgtgcgtccgccacgacgcatcgatgctatgcgtccacgatttcgaccaagttccagatttgcccgcgaaccatgtgccatatatggtttccactgttgttttcgcgtttctcggatctatataagtgccagttgcaatggccacttcgttttctgatagaaagatccttgccgccttcttggtgcggaacccccgcttcgtatgctgcacgtgcgcgctgtcgcggtacgcaacccggtacagttgctcgcccttggcgtttgcgtaggagtggatggagcccatatcagcgatcctcgtgccgatagtgagaagagaggtaatcgaagcggtcggtggcgattgatttcaagagtccaagcatgcgattgcttagttcctcgcattccttctcaaacttatcgtgatcggaaatggttagttcgtccttgcttgattcggtgttcagcatggacagcatgtgcttcctgaagcggatgaatctgcaccattcgtcctcgaatttgatcattgtgaggctcatttccccagctaggtcatcaagcctgttccgcgtcggcgtcgcgtagacctgcatgatatgttcctccgcatccgaatcatatcccatgcatcgcagcagagggagtacttcactggcgcgcagaggacgggcccctctctcgatgttggactgcgtcgtcgcattccaacggtatccggccttctgcatggcctttaccacgtcatcgattgtccggttgcgttccaggcgcagacgctttgcatttcgcccgatagcttcattcaaatcttcttcattcatggaatcaagattagcagtcacaaatctgaaacgcctcaatgcaagaaaaacgttttaaccgaatcgtatgaaatgaatatgaatatatatgttacaatgaaatcgaaaaatataatcccgaaacgaattacttgaaaagaaggaaaaatggaaggaacagataagagtcgaaacggattactagatatctctggattctgcgcatatgttcccggcatgacccgaagcatcgcggctcagcttcgttataacggaaatggaccgaaatttatcaagccatcgccgaaactcgttgtttaccgcaagtcggacgttgatgcatggctgcaagagcacgagcagaccatcacggcatagggagaagaaaacccgcatccacggcaatggatacgggtttaatgcttgctccaccattatagcgtgcaaaagacgaaagacgattgacgagatgcttgcattcaatcaaaatggccagccgtacgagcctctaacgggctatcccggacatgagcagatacctccggataggcgaaccattttcaccgcaacggaattatccgaggcgaatatgtcttcaatcaattggctggtccccggcttgatcagttctggcttgacattgcttgccgccggtccgaaaatcggcaaaagctggctggccttgcagctttccatagccgcggcgacgggaggtcccgccctaggctacgcccgcgtggagcaaagacctgtgctttacattgcactggatgacaaggggccacgccgactccagagacgtctgcgcatgatgggcgctgatcggatgcccctcgacagccttaccttcataaccgagattcccagtgccggtaccgcctcggaaatgattgccgaataccttgaccaaccgcaaaatgtaaggtcgttcgtcatcctggacacgctgggaagcgccttgtctgcatacgcgcatcggccgcaggagagcagttacgcatacgacagcagaatcttgggcagcttccatgacatcatggattcgcacccggacgccagtcttctggtggttcaccatacgcgcaaaatgggtgcggtggatgctgtggataccatcaacggcacgcagggcatcagcgccgcattcgatacggtcatggttctcaataggccacggcagtcacataccggaaccctgttcatcacgagccgcgacgtcccagaaaactcctatgcaatgacgttcgacgctcaaacgggactttggcagctggaaggcggaagtcttgagactgcagcgaaagcggctcaggaacgcgagggtagtggacgtctgggtgaaaacatgagtcggcttatatccgttgtgaatagcgcagcgaatccggtcacggcgagcgatgtggccggtgaactgggctgggatgtcacccgtgccaggacatatctatcccgcgcggtcaatgcaggacaaatcttgaaaattgggagggggctatattccagtttcgagaccgaagaatctgaaactcacggcgggatgccggcgatgaagagattgtgagtagactcttcgttgaatatacgaacgtcacacagactaaacagtctgtgtgattgtttttggctattgcaaccgaactcagatgaattgagtgccgtcgtcgaacgacggttgctgctggacgtccggctgtggcagcggcggttcggattcggtggtagattccgccgcaacggtgttcttggcttcttgaggtttcggctgtttgtcgggatcgtaggcgatcgcgactccccaggcgtcgccgttcttctcgcggaaggctatcgactggaaacgcacgcgtctgccgtcgatgagccgtccgcgctgccatttgttcctcgtggcctcagctttcaccttgccgatggcgatggcgtggggcagctgccaccattggatatcggaaccgtggctgtgcatgctcggatcgttgatgatctcgagcgcgagccgttcggccggcgtccgttctggcaccaggtcgatcctggtcagtccgagatgctcggcggttttgtcgatggaatactccatctcgcgcactttggcgcgtttggatccttcactcattgttattcctttccggcaaaacagactcaataaggaaaataaccaatgaaccataaagaaaccataaagaaaaagaagaacagaaaaatatagataagagcaataggaaagatacagaaaacaaagaaaacatagaagtaagagaaaaaacatgaataagaagacaagaaagaacaaaaagcatatgctaagatagcaagaaatctaagaaatctaaggtacttaggctgctaaagcagccatgacgcttcgcgggaggtgagccagggtcatgcagggtgccatcaagccgattcgcgtgggtggtggctcactgggccggtaccttgaggagtgcgagtctccggagggtgatttcagcggttacctcgaaggcaggaacggaggtactcgtttcagccgcttgtccggtggtcggaccgtcgaggagcggggcatcgacgcgggtggtctggatgcgatgctgcatggcagggacccattctccggtgatgttctgcgttccgtcaaggacgggcagatcggctgctatgacattcctttgaacgactgcaaggggctcgaggttctgggtgtgcgctacggggacgtgcgggacgcgcaccgagtggcgcagcggcgtggcatggaggccgtggagtcgtatctgtccacgcatctcctggcccgccggcaggatcatggaaagacccgtttcgtgcggtccggtcaattgctgttcgcggcggctgagcattggacgagccgtgacggcgacccgcacatgcacacgcacctggagctcgtgaacacatgcctcgcgggcggcaagtgggtggccgtggactcgcggcagctgtaccacatgtacgagaacatccgcagcgtgtacgagaccgtcgtgtacggtgatccgcggctgcgcgcggtgcttgcctcgcatggcgcgagcatcagccttcgcggcggcgtcccgcagctcgtcgagggcgcggccgacgtgttctccaagcgccgtgacgagatcaaccggcgtctggccgaactggtcgagcagtggaggacgaaccatgccgccggcatggtggaagtgcgtgacgcggacggcggcgtggtcggccacgctggataccaggacatgacggaaccggaccggctgaccatggtgaagctccgccagcaggcgtgggcggacaccaggaaggccaagggcgagagcaacacgcgcgtggattatgaggcgtggctttcggagctggaggcggccggatacgatccggaccgcctcctggacggcggtccggtcaaacccgcgccgttggcgcgcgacgtggccggcgcggacatggaactgtgcgcgttgaacgcggtcaacgcgttgtccgaaatgcatagcgcgtggagccgcaacgatttggaggtcgcggtgtacgaccggatccgcgatctggacgtgaccggcacccgcgcggagatcgagaccttggcggaccgcatcatggaccacgcggtgggactatgcgcgaacctggacgaggatccgcgcgtcatgctgccgttcatgaagtccctcacgtccaacgcggtcgtggaatgcgagaccgacctgaagggccgtctcgcggcacgcggcatcgaacggtcggagaacccggatctcgagggcatcgcggaggcgttcacgctcgacccggggcagcgcgaggcggtggagacgatctgcaagggcgacccattgaccgtggtcgagggcgcggccggcgcgggcaagacccacatgctcagggccgtcaagagcttctgcgacgcggccggacggcgtctcatgctggccaccccgtaccgtaaggccgcggaggtggccgccggcgaggtcggcgcggacgcctgcaccgtgatgaagctcctcgaagcgtatggataccggcacgacgacgagtccggcatctggagccgcgtcaggcccggcgggaccgatttccgcggcaacacgtaccagggagtggacgatcggtaccggatggacggcaacacatacctcgtggtggacgagtcgggcatgctggaccaggagcaggcccgccgcctgctcgccatcgccgacgagaccggagcgagcgtcacgctcgtgggcgacaccgcgcagaagggcgcggtcggccgcggcggcgtgctcgccatggcgaaacggtacaccgcgaacgtggtggacatgaccgacgttcaccggttcgccgacccggactacgcggcgttcagcctgcggctgcgcgcgcattccgaggcgacggcgcccgcgctggcgcgtgagacgatggaccgtggcatggtctccatggccggttcggacgaggccacggtcgacgcgatcgctgacgagtggatgcgcgtgcgcggcacgaccatcagcaccggcacgaacaggcaggccaacgccgtgaacgccgcgatccaggagcgccgcgccagcatgggacagctcggcggtgtccggttgccggacatggtggccggcgagggcgtgcgcgtgggcgacgtggtgatgtgccgcgcgaacgacaacaaggcccgcgtgttcaaccgagaggtctacgccgtggtcgccatccacggcgggagcgtgcggctgcgcgcccgtgacggcggcctgcgcacggtgtcgtccgactacgtgcgcgagcacgtgcagctcggctacgcgtccacgacgtacggcgcgcagggcatcacctgcaaccacgccgtctactgggccgcgcccggcggggacggcagcgacatgtacgtggcgctcacccgcggcaaactgtccaacaaggtgttcatgaccgccgcggaccgtggcgaggcgctggagaccctggaggggatcatcggccgcggccgcggcgacaacgggctcgacgacgcacgcaaggagctgcgtaagaagttcgaagaaatcggaacggagcagatggaactgaccgattctaatcggaacgcgggcaagaccattgggtggaaagcgaaacagcctgaatcggggctgctctctgcgatggagccggaggagcctcaatggtgggggcagcagctcgatggtgacggcatgctgccggatccagatccaggcatcgatccgatgaccggtatgatacccggtgtcggctcaggcctctcgatgtgaatatgagaggagctccgcgttgccgggattcgagtcggcacataaccggttgcatcgccgatatgtgttatatgtgttattttgctttgaaagcccttgaaaacaaagggattcaggaagataacagttgttatgttgagtgtatcgagtgttgcgttccgtaaggtccggttatgactacatgaattcaaatgttgtcagaagctgattttaagcgaagcaaaatttcatgcatgcgggcatcatcacaatccctcgatcattcttatgatcgagggattgtgatgatgccgttgatgcttatctggaagacatgctacgtcttcacgtgctcctgcaacatggcaggacgcagtagattggacaatgtctcattgtcgtattgctgcatatcgcacgttgcggccgactcctaccttcttggcgtgaccttctttgacgagtttccgtagttggtagtacgcctgattctcatcaaggtgcagcaattccatcacatcgtttttgcttacggttttttgctcgtgcattagcttgatgattaattcgggatagcgcactttatcgatgtctgactgtctgacgtattccaccatcttgccgctgcgtcgatacacttttgctcccagcgtgtatgtgcggcgggtgccggaaccggcgctttctacgagtccagactccgtcagctgccccaatacggtgcgcaagcgctgattgctcatgtcgagagagtccgacagcacgtcaaagccgcagcgtctttcctgcttgagcttatccaggatgagcagtccgtcgagagacatggatttgccgctgcgttcgcgctcctcggccagtagctccacgaacgctttgtcgggcgcgcttcggggcagtagaaccgatactctgcttccgttggattttgaatagtcaggcaaggggcggccatagttcagggctccctcaaagatacggtcgattccgcgtccggttcgttcggcaaggcctgttcgttttagcgcgtccatgaggcatggattgcgtccgtgtggttccgcggtaagtagattgtggatgttgatgccttccacgaatccgccgggattggcaatggttagtcctgcgtcgtctactaatactcgcacacgtccgagaactgaataatctctgtgcccgaacgcgttaaccaaggcctctctgaaagctctctcgtcgaattcgggcaccatcgaagagaacagtcccacatttaattccgttcctggattccaaggggcgaatgactctgccatttgctctatggttttgagcagtgggccacgatatgtcttgtttactttgatgtcggtgccgacaaggacttggaacgttgcttcgtttgttgggacgaggtgttgtaatgattcctcgcggccgatgagcagtagtcccgtcaaggttggtgtcatattcccgttcactgacacggtgagtcgcagagatttttccagatcctcgtctgaaagctctagcagatttcggtcactggattgataagtggcaatgattctacgcaaacggtctcgttccagctgatcgaaatcctcccttgtggcttccggaaccggttgggcggagtagtcgagcttgcctagatcggaaagacgggtggcaatctcatacggatacatgggcacgctctcgggcgtgccgtctactttcaccatgcggcgaaggattttccctgatttggttgacgccacgctgtgtgacttaggtacgtcgatttggatgacggtgatgtcatctccgactaattgcgcgcgaaccgatatcggaggcacggttttgttggcgatcattgctgataggccgatggggtcctgatgcttacgctgtgcgccggtcggagtgccatcatcttcgactcctaaatatacgcgtccgccgtccgtattggctagggcgacaacggcttccactaattcggaatcaggcaagctcttgatgtcacttttgaattctttggacaaggtttctttgccgtattcatgcgccatttgctaccgcctgctctgattctctgaattttctctgaattatacattctttctctgaattcagagaaagagctctgaattcagagaaagagactggccgcaaaatcgatcgtgttatatgtgttattttgctttgaaagcccttgaaaacaaagggattcagaaagataacagttgttatgttgagtgtatcgagtgttgcgttccgtaaggtccggttatgactacatgaattcaaatgttgtcaagaatgttgtcagaatctgaatttgagtaaagcaaaagggctggaatcgttgaattccagcccttctcggctcgtgcgagcggggggagttgaacccccacgagcatacactcactgccacctgaagacagcgcgtctaccattccgccacgctcgcagacagtcgattaatttacaccaaaacccacgcaacctcaaatcggcgtgtcgcgccgccattttccgtaggaaaatataagcggtgcgacgcgaggagggaggaggccctgtgggcttccgtatgacggagccatccttgctcccgccattttccgtaggaaaattcaagcggcgcgacgctctgtgcgtccgattctggcgtttcggacatccagcgagtgtttttaggttgcttacttgtccgtttctccagaatcggacaagtagaacgtgagataagcattgtggttgtccgtttcgcccgaatcggacatgtagggcatgaaacatgtggtgtggttgtccgtttctccagaatcggacaaccgggaggggcggtatgggcattagatgtctgattctggagaaacggacacattgggtggtggatggcggggtgagacggatgggtgtatgcatgacatgcgcggaacacatgaaaaaaggcgccgacgggtctgttcgtcggcgccttggaatgcggaagtgtggatcagcgttcgtttgggtggaaggcccaagtgaaatgcatcatccgcgggaaccgttggcgtagaagcgggccagggtttcgtcgcggaattcgtcgaaatatccgccgtcaatcgacgcgcgaatatcgtccagcagcttcacgaagaaatgctcgttgtggatcgtcgccaatgtgaaaccgttgaattcgcgggcacgcaacgcatgatccacgtaagcgcgcgaataatgcgtgcatgtgtagcagtcgcagccctcttcaagtggaccaaaatcatgcttgaattgcgcgcgcttgatgttgtaacgtccgccgcgcgtgaaaatcgcgccatttcggccgcaacgcgccggagcgacgcaatcgaacgtgtctccaccattctcgacacatgcgaaaatatcgtcgactgcggcgatgccgagcacgtggcgcggtcggctttccggcatcgcatcgcaaatccaagcgcaagtgtcgccgataatgcgcttctcgatcgcgcctccgataccgacgccgtcgaagtccaacgaagcgatctgttcggccgcatgcctgcgcaaatcctcataattcgcgccctgcaccacgccatacagcgcctgatacggcttgccgacgcgctcttcggtaagtctcttatgctcggcaacgcaacgctgcgcccaacggtaggtgcgttccacggaacgctcctggtagccgcgcgtgttcatcagtgtggtcagctcatcgaacgcgaacatgatgtcggcgccgatcttatgttggattcccattgaaatttcggcggaaaaacggtgcagtgagccgttgagcggcgatttgaacgttacaccgtcctcgtccacgaacgcgagacgctccttgccttcggcgatcacgtcgtctgatttcatgccggtcacgtccatggcgagggttttcttgaagcctgcgccgagcgaaagcacttggaaaccgccggaatcggtgaaggtcggaccgttccagttcatgaatttggcaaggccgccggcttcgtcgagcacttgctcgccggggcgttcatacaggtgaaacgcgttggacagcaggcattgcgcgccgaggtccttcatggtttcgggcagaacggctttcatcgcggcctgcgtggccacgggcacgaacgctggagtgtgaatatcgccgtggggggtatggatgatgccggtgcggccgtatcgtgcgccgcctcgtcccttgccgtcggctgcgtcgggaagacgggttttctgctcgaaatagaaggcgtcgcgtcggcccggcttgcctggttccgctccacgcggatgttcgatgagattttcggacactgcggttgccgcgttttgcgtgtcttgcgctgtgtcggtagatgattcggtaaggcttgtcatgcggaatattttatgcgatagcggcgattcttgaaagtgctgcaaagaatgcgatcggtgaaatgaaaacaaggaagatgtggaaagtgcgatgaaggtgccgatcgcattttggtgcgattttcagattcaatggtgatgttgaacgtatttggctgctactttcaacaaacattcaggaaacttccagagcgagtatctttactcatagatagcagttcgagcggcacgattgctgatttgtgaaatgccgcgagacgaataaggagcgaaaatggctgaagagaacgaccagaacgccgtgcagccgcagaatgacgaacaacagaccgtgccgatgccgccggttgatgcggaacagacgcaaacttacgcaggtgagccgtatgctgcagagtcggctaccgaaccgattgacgtgcagggcggtattgaggatcagccgacggccgccatgcctgttgcgaacgatggcgcttcggcggaatccgcggctgcggcgggcgatacgccggattatgcttccgcggcggacgaacgtaccgtggttggcggttccacgcaggatgcgccggcccagcagtaccgtccggcaccggaatatggtgcgtacggtcccgtgccgacgcagccggctgatggcaccgcagccgcgaacgatactgcgaatggtgcgccgaacatacccccgcagccgcaatatggcgcgtacgggcaggctccgcagcagccgcagcggcctcgcaatcctttcttcggaaatccgtatgtgggtggaaatcagcagaacgatcagcagaacgcgcaatcgaataacggcaatccattcatgaagcccgctgcgcaaggcggtgccaacgtgccgccagcagcgccgaatactcccaataacggcaacccgtttgggaatccgaataacggtaatccgttcggtgccccgcagcagaatggcgcagcaaccaagccgaagtccgcttccggcgtgaccgggcatgtgatgaccggcgtggtggcggccctcgtctccgcggcattgtgcctcggcgtcggctacgcggcaatcaccaatggatgggtgaccgtacccacctccagctcactgaccagcgtgaagtccaacacgtccggatccggttcggcgaaagccaaatccggcgaggccgcggactggagcgcggtggcgaaagaagtgtccgattctgtggtgtccattgacgtggcaaccagcgacggcagcgccaaaggctccggtgcaatcatcagcgacaaaggctacattgtcaccaacaaccatgtgatttccggcgcgaagcagattcaagtgacgctcgccaacggcaccatctactcagcgcaaatcgtcggcaccgacaccaccaccgatctggccgtaatcaaactcgacaatccgccgagcaatctgaaagccgcggaatttgccgattccgacaatcttgccgtgggtgaatccgtgatggccatcggcaatccgctcggctacgatgacaccgcaaccgtcggcatcgtttccgcgctcaaccgcccggtgaccgtgtccgatgacaacaacaacgacatcgtcaccaacgccgtgcagattgacgcggccgtcaacccaggtaattccggcggtccgaccttcaatgcggccggccaggtgattggcatcaactcatccatcgcatccaccacaacgtcttccggcaccgccggatccatcggcatcggcttcgccattccgtcgaacctggtaaagcgtgtggctaacgagatcatcgacaacggcaccgtgcagcatgtggcgctcggcgtcaccatcaagagctccacggttgaggcggacggcgtgacccgcggttgcacgcaggtgcagtccgtggtcgacaacagcccggcggccaaggccggagtgaaggccggcgactccatcgtggcgttcaacggcaaggcggtgaacaacaactattcgctgctcggctacgtgcgcgcctccgccatgaacgacaaggtgacattgacggtcgtgcgcgacggcaacaccatggagcttgacgtgacactcgaccaggaggaatcccaaacgaactcctccaacagccagaaccagcggaacaacggcaatgatggccagagccagaacggcaatggcaacggttacggtaatgacggcaacggcaacggaaatggacagagcgacggcaacggcagcaacggctacggtgacggtggcggcctgttcgacccgttcggcctgtggtaaagcgagatgttgatgcggtgcgtgaattgacggacgcaagttgttgcggtgcgcaagtcaagactgttgggctggctaaaacgtttcgcgacatgcgaacggacggaagccacccgataggctgacggcgaagacgcggctggcaccacgaaatcgcaagtacaacgaaaaccgcgaaaatcaacaaaaagcaagccaaaagaagcatgcaataagggctgtgtgagcaatcgcacagcccttattgctgtattgcggcacaaaaatcgcaaatatttgctatgctgaaaatgtctttttacgccgtgtatcgatggctcgcgcgggcgaggcgccgatgggttaacaaggcgtccgatacgagcgtaaggagattctcatgcgtagaatcatcgatatttgctggcgactgtgcaaacaggttccgttactgccgattaccattctgtccgcgattccgttggcattgctgggggagtggaagccgtggggcgaggctgcgtgggattcgtggatttcgcaagtcggcgttgacgggttgagtgcgttcaatccgggcgttgggcagtggattgtgatcgcgttggttgcgtacacgattgtggtgacggtacgcggcatgatcgacgatctgcggcacgggcatgttggcgtcgatctgctggcggtcgtcgcgattgcgtcgacggtcgcagtgcaggaatattgggccgcatgggccgtggtgctgatgatctcgtccggcgaggcgatcgaggaattcgcgcagtcaaaggccgaaagcaacctgaccgcgctgatcgacgcggcaccgcgaaccgcgcacgtggtcgtgctgcccggcatgcgggggcatgtgcacgcgtcgggcagcgagcatacggccgacgtgaccgccgacggatttcgtactgtcagagtgtccgattctggagaaacggacaaccaagacggtgaaaagcgtgcttttgcgtctgaatctccagaaacggacacaaaaggtgcttcgcagacgtatgatgcggctggagagcgtttcgaaacggtccccgttgatcaggtacagctcggcgacgtgatcctggtgttgcccggcgaaacggtgccggtcgacggtgagctgctgtcgggcgtggccacgttggacctaagcaacatcaacggcgagcccgttccccgcgaagtatatgcgggcgctcgcgtgatgtccggtgcggtcaatggctccacaacattgaccatgcgcgccacgcaacttgcgcacgattcgcaataccagaagatcctggagctggtctcgtcggcgcaagagtcgcgccccgctgtcgtgaagaccgcggatatgcttgcagtgccgtttaccgtgctttcgcttgcgattgctgggattgcatgggcgatttccggattgccgctgcgatttgcgcaagtattggtgcttgctacgccgtgtccgctgttgattgccgcgccggtcgcatatgtggctggaaccgggcgacttgccaaagcgggaatcctgatcaaagcgcaggatgtgctggaaaatctaggtcgcgtatcgcatattttcttcgacaaaaccggcacgctcaccgtcaagcagccgcaggtcgtacgtgtagagaagccgtttgagacgagttcgccgttcaatgaggaccatattctcatgatggccagcgtggtggaaggctattcggtgcacattctgtcgaaaggcatcgcggcggccggacgcaaggctatggatgatttgtatgcgcggtatgcggcggggcagaggctgtgcgtcgagcgcgatttgccggggcacgggcgcgactatccggtggtgaagaacattgtagaggagtccggcaagggtatatccggcgaagtgaacgggcatcaggtgcgcgtggggcggttcgcatacgtgacggctgacgaatccggattcacgccggtgctgcatatgccggatgcgacgtattacgtgtccgattctgccgaatcggacaaacgggagactcagaatgcgctgcggatgtccgattcaccagaaacggacatccagagggctaaaacgtgtgtttacttgtccgattctccagaatcggacactatgggagtgaggaacggggtgcctgacgatgcgcagcctgcagccgcgccctctacttccgcgtccgttgcaacccaatccgccgctcgcaagcctgaaaccgcaaactcgctgtttgccccgctcgctcctgacgaaatggctgcatacgtggcgattgacggccgtcttgccgcccgcatcgtacttcgtgacgtacctcgcgagaatgcgaagcgttctttggctcgcctgcacgagttgggtgtcaaggaactgtccatgcttaccggcgacaaggctgcgtccgcccgcatcatcgcaaacgaagtcggtatcgacgacgtgcagtccgaactgttccctgaagacaaggttgccgccgtcaagagcgccactgaatccaagcaccagaagctgtcgttgtggaatcgcatcaagcaacgcgtaaccggcgaatccaagaatcgtcaaatcaccatgatggtcggtgacggcgtcaacgacgcccccgtacttgcggttgccgatatcggcatggccatgaccgacggcacgtccaccgcggcttccgaatctgcgcaagtggtcatcatgaatgacgacattgcgtccgttccgcgggccatcgccatcgcgcgccgcacgaaaaaggtgatgttgcaggcggtgctgatcggcctcggccttgcgattatcggcatgatcgcggccgcgttcaatctgattcccgtggttgtcggcgcgttcatgcaggaagcgattgatgttgtcagcattctgtgggcgctcaccgtgcttttcgaccgtggcgaatcagcctgattgcgcctcgaaaccccgtatctcgcctatatatggcagatttggaggtctgtcagcaagtatttcgcttatatctggcaggtccatatgagaaaaccggacttagggggcgagaatacaccctctaagtccggtttctcaaaacagctctgccatatataacgcagatagctccggacgaacttcggaatctgccatacataaggcatgtataaggcagattcggaagttttgggattgtttacagcgagctcggggagatttctccagcaatcgatgtgtgcatccacttgccgaagtcggctccggtcacgccttgagacagcaggaacatgattttcgcatacgtggcttccagcgtcatatcgccagatccaattgcgccggcgcgtgcgatcgcatcacccgtctcgtaatggccgagcagtacttccgcctgctggcactgcgatgcaatcacaacgggaacgccatcatgcagcacgtcggcaatcacgtcagtcagtccaggctcgtcgcttggcacattgccgacgccgtacgcacgcaacaaaaccgcttccggccgcggcgtaagcatcgcttccaaccgtgccgcggaaatgccgggtgccatatcgatcaccgcaacatcatggcgagagtaaggctgaggcgacgtccaaccgcagccaaccgcagcggaatcgcccgcataccaatgccatggcgtgccagtgcgtgccagcgggccgacggaaggcgccgaaaaaccttcaaatgcccagctcgacgacttgctcacacgattgcccgcaaacaggtgatgtccaaaaaacagtcccacaccgtggaatcgtccgctcatcgcggcattcagcgcgcccgtgacattcgcagtggcgtccgactcgatcttgccaagcggatgctgtgaacccgtgaaaatcaccggcttgccaaaatcagccaacgcatacgcaagcgcggcgctcgaatagctcatcgtatcggtgccatgcaacaccacgaacgcgtcggcatcatcgcggtgcgcacgcaaatcgtcgaccatcgtctgccaattgtcgggagtcgcattcgacgagtcgataagaggatcaagttcggtgaacgtgaacaggctcgcgtccatgtgcgcgtcctccagcagacggaacagccatccgcgagtgtcggcgcccggaatcaggccgttcggcgagtcaatcatgccgatagtgccgccggtatatgtgatgtgaatgcgcattgccaccttcttacgattgcctggtacttaataagtacttgcttgcgattctgcgattacttgaattacttgcgattgtacgtgcgcctgccgtacgttgttgcgtgcgattggtgcaggcgtacgttggatgagtttggctggattcgacctgatctgacctgatttagtgagatccggccaaatccagctgaactgcgatttcgcgaaagctggccgcaccgacgtcataattgctacccctgtgtgaatgccgcatacattatatggacggctctttaccgtttgttgacattccgctcatagtgcgtcagtggccacggtccgtgcccctcttccaacgccaggttgtccgattctgcagaatcggacaaccaaacacgtgttttgattccggatgtccgattctggagaaacggacaaaaagacgtacatttcggtactctgaatgtccgattctccagaatcggacaaacgagacaaccgagacgtgacggaaacgacatgacggatgggcatacgtgagaaattccaaaggacgaaaccggaaggcgaggcgaagaagtcgtaagaaagtacatgagcgcccctgttgcaaatgcagggaatgcattaggctagagcgcgtgactgaaactcatgaacttcgtattgctgtaatcggcgccggccctgcaggcgtctactcctctgacattttcctgcgccagttgaagaagctcggcgaggagctcggcctcggcactgccgcccgaatcgacctgttcgaaaagctgccggtgccgttcggtctggtgcgctacggcgtggcccccgatcatccgtccatcaaattcatcgcgtcggcactcgaaaagacgctcgacaatccggacatccacctgtactgcgacgtggaattcggcaaggacgtgacgctcgacgaactgctcgaacgttacgatgccgtgctgttcgccaccggtgccgtcgaagacaagccgctcggactgccgggcgccgatctggacggcgtgtacggcgcagccaagttcgtggaatggtacgacggttatccgaccggcgctcgcgaatggccgcttgaagctgaggaagtcgccgtgatcggcggcggcaacgtggccatggacgtggctcgcgagctcatgcgcaatgccgatgatctgaaggagcgcaccgacattccggacaacgtatatgagggcatcaagtccaacaaggcgcgtgtgcttcacttgttcatccgtcgcggtgtggcgcaggccaagttctccgtgcaggaattgcgtgagatggagaagctgccgggagtgcagctgatcatcaacgaagacgatttcgatttggatgaagacacgattgaagaggccggcaaagacaagctgactcgtcagatggtcgaagagctgttcacgattcgtgagatggcggaagacatggaagatgacggtgacgtggattatgagggtaatccggctgaccgcaaatattacgtgcacttcaattccgctccggtcgaagtgttgggtgaggacggcaaggtcgttggcatccgtgtggaaaagaccgagacatcggcggacggcaagatgagccgtaccggcgaattcgaagagtatccggtgcaggctgtgtaccatgcgatcggctacaaaccggctaccgcgccgggcattgcgtacgacgagcgtcatgcgcacttggcgaacgcgaacggtgacggtcgtatcactacggccgctgaagccacggatgaagtgcgcgagcgtctgtatgcgaccggttgggcgaagcgtggtccggttggcctgatcggctccaccaagtccgacgcactgctgatcgtgaccaatatgctggaggatttgtcgaaggctgctgaaggcggtcgtgtggctgccgatcgtgatccggagtccatcgaccggctgctggaatcgcgcggtgtcaagccgatcgacttcgctggctggaagaagatcgatgcgttcgaacgtgccgagggtgcgaaggaaggccgtgagcacaagaaggtcatcgatccggagcagatgcgcgccctggctcacgcttaaggtgggtgtttgggatctgatctgataggtcccaggtttctttcatgcgtcttggatgtccgattctggagaatcggtcacccaagacgcattttttatcctgtgcttgtctgtgtctggtgaatcggacatctggagtgtccgaaacatgttctgtatgtctgtttctggtgaattggacatgtaatgtggacgaaggacttgctacttgtccgattctcccgattcggtcacccaaaggcctcttggcatgcattggatgtccgtttctctggaatcggacatctggggagaagctgagcatgcgaacttccgcaactgccctagtcttttccgcaacccagtctccagcgcatatccagcaaaaactcagactccgtttctacgctagtgaccatgaacggcaaattgcaggtgcatggccattgcaatggcttgaagacaacgctgttattcgcgttgatgtggggcgtcatcatgctcatttggtgggcgaccggtggcagccagcgcacgcttggtatctacattctcatcggacttggctcaacgttcgcatcctactggttttccgacaaactcgcgatcgcatccatgcgcgcgcaggaagtcagcgagcaggaagcgccggtactgtacaaaatcgtgcgcgaactgtcggcgaaggcgggcaagccgatgccgcgtatttatatcgccccaaccatgagtcccaatgcgttcgcaacaggacgcaatgaacgtcatgcggcggtctgctgcacacagggcattctgcagatgctcaacgaacgtgagattcgcggcgtgctcgggcacgagcttatgcacgtgtacaatcacgacatcctgacgtctgcaatcgcgtccgcaatggcgacggtcatttcgtatctcggatattcgctcatgtatttcggtggtggcaattcgcgcgatgatcgcaatgactcatcctctaatggtcttggattactgggtgtgctgttgagcacgattcttgcgccaatcgccgcttcgcttattcagatggcgatttcacgtacgcgagaatatgatgctgacgaagatggttccatgcttacggaagatccggaggcgctcgcgtccgcattgaataagatttcgaacggcgctgagacgatgccgatgcagaagactgctggtacgcagtcggttgctgcgatgatgattgcaaatccgttttctgcggaaggtttttctcgcctgttttccacgcatccggcgacctcggatcgcatcgcgcggctgatgcagatgagtcaggagatgaaggcgcagggcgtgcagtccggctatttggctggcggttatgcgacgagcgggtatgcttcggaggatattcgtcggcagaatgggggtgtctctggtgccggcgccggtgcgggtgcagggggatactccggtgggggctattcgcgagattattcgcagcatcccgtgcaaggcgggtatggtcgctgatcggcggcgattgcaatgtgcgcaggttgcgcaagtcatgcgtgattgcataggattccgctgattctgacgcgaattgcgtgtgtttcctgtggggatgcattgcagaatattttgatgtcatctgatgaatgacattaatgctgttgtggttgttgcgcgttgattgatatgcgatttggcaagtgggtgacggtatcgaatatcggtcgatggccgtgaattctgcgaatgcatgctagactaaatgattgtgcccaaaaggcacaaccttgcggatgtagttcatcggtagaacgaaagcttcccaagctttaaaggcgggttcgactcccgtcatccgctccattcgaaacccttggaatcgttggaattccaaggttttttctattgccgtaaaagacccgtgaagtcaacttcgcgccgcgcaactgtcggttgcgtcgcaaaattcggttgcgagtcgcaatgcaaccgaaagatggtggcgtggaacgagacgtttatgacaagctgttgcttggcaatcgccaataatcgcaagtcgaggcgatatggaaactcgacgaaagggcggacatgagtttcaaagagaatctgcagtatctgcgcggttcgcgcaacatgacgcaggaacagctggcaatgctgctgggcgtttcccggcaggcaatttcgaaatgggagtccgagaaggcataccccgaaatggataagctgctgatgctttgcgacatgttcggcgtgacgttggatgatttggtcatgggcgacgtgcgcgcgtcggcgggctgtgggggtgcgggacgcgtggacttggctgctgatacggatggtgtggccgcgtcggttggggtggccgacgctgctgttggcgcggttccgggggtaatcgggtttgcggcatcgcaggtcgcaggaatgtccgattctggtgaatcggacgtgagggatacgaatccgaatgtttgtgcgtccgtttctggtgaatcggacgcacaaggtgccaaaaccggtgttcaattgtccgtttctccagaatcggacacgcgagatgggacggacattccgcaaagcgtgccccgacatatcgtgcaggatgtggttggctacgacagtcatatgaggcgttttgcgtggcttattgcgattggtgtggccgcaatcatcctcggcgtcgcggttggcatgttgttttcgccggaggggtctgtcttggggccgtcgccggtgaacgacgtgctggtcacggtatgcacgttggttggcgcgatggtcggtctcgctttgctgataccggccggaatcatgcatggcgatttccgccgtcgccacccgtatgtgcaggatttttacacgaatgaggacaagtcacgtgcgtcggtcgtattggcgattggtgttgcgattggtgccgtgctgattttggcgggcgtgtgcgtgcgagtgttttgtgacgagtttgttgccgacggagacgcggggtggccggacagcgttctgctggcttgcgtggccgcggcggtgttctgtttcattatgtctgggatgacgcatgacaaggtgaatgtggacaaatacaatcgtgaagccgaagaggaaagcgcgcgcgagggacgttccgtgccgcacccgacgatgagcgagtcggacagattttacagaagacttaccagtgcaatttgtggcgtgatcatgttgttagcgactgttatcgcgttgcttatgctttttcttggaacggcgggcagtgatgttgacgcgtggatgaaggtgttctgggtcccgtggccgatcggcggtgtgctgtgtggcgtcgtgggcatcatcgtgccattggttaaggaggccaggcggcggtaaaccaacaaatagtgtccgtttctgcagaatcggacatgcggggtgggcggcaggtaggctggaatccgtgaatacggatcagaaacttcccgccgaatccgcaggcgaacgccccagtacccccctatttggtcatgccatatcacacgcggcgacactcatcggcctgttcgcaatcgtcctgtggggcttcatggccggcctcgtgcgactcgtttccgaatcgttcggcgccacgctcggctcggcgctcatctacactgtcggcggcatgctcctgctcatcgtgcgacggccgaaaccgattagccaagcgccacgcaagtacctcgtcgcaggcggactcatgttcatcgcatacgaggcgtcgatctcgctgtcgatcggtctggccacaacgaacgcgcaatctgtggaagtcagcctcgtcaattatttgtggccgacgctgctggtactgatgaccgccgccgtgtcgcacaaacgcggctcggtctccgaagcgctgccgggtgcaatcgtagccaccgtcggcgtggcaatggcggtcggcggtgaaaaccttgacgtgcaggaagcggttgccaatatcgccagcaatccattgccgtacgcgctcgcgttcgcaggcgcctttatttgggcgatttacgcgaccgtgacgccatcgatgtccgatggttacgatggtacgacgattttcttctgttgcgttgctgttgtgctgtggattatccatttcgtttcgggcgacggtttgccagctgtagcgcctggcatcggcggctatatttcgctgctcgcatgtgccgcgtcgattgctggcggctacgcgtgctgggggtatggcatgctacatggcagtatggaaacgcttgcgatcggttcgtatgcgacgccgctgttctccactgcttccagcacgctcctattgggcgtgacgttgggcatgccattctggatcggtgtcgcgctggtggtggtcggctcgctgatcaacgtgtggtttgcgcgacgccgctgattgtccgattctgcagaatcggacgcttgttggtgtgtgaggaggcgacatgtggggtagtggcggcgcagaggagcgccgggatggcgcagcggtacgtaagggaagtgaccgggcaagacaatgcccttacgcatccacgctagcttaggtttttgctggctggtatttggtgtgtgttgccgttggcggtgatggtgatgcgtcgccaatgacgcgtccatgtgtgccagccgaaaccgatctaaaccggcttaaaccagcccgttcaaatccacctcgtcacatcaccttggtggattccagattgcggctcacccagttgttcaaccggatcaccggcttgcgcaacaccaatcccagcagcagcgaaggaatcaggaacaaggcgagatacaccatgtcaagcaggtactcattgccgtacgatccggccatcgcggcgtgcatggcatcgatggcgtgcgggaacggtaggaacgggtagagcatttggaagaacttcggcagtgtctcgatagggaacgtaccgcccgaaccggcgacctgcatcaccagcagcaccacggccacggccttgccgatatcgccgaacgacacggtcagcgtatacacgatattcgagaacacgagtgcggcaagccaccccacggcaaggaactgcagcgcatgattcgcctgcacgccaaggaaatacatgtcacccaggcaaaccagtgtgccctgtagcaacgcgagcagtgcgaagatcgcgtaccgtccgaaatactcgtggtcgaggcgcagtccccaacgtgaggcgttccccgggccggacgggccggcgacgcgcggcagcgtgtcgcccaagcccagcacatgcgccttctcgcggtccgaaattgtcactttcagcatggcgcacaggatgatcgcacccacccagattgacaggatcgtatagaacggcgccatggccgaaccgtagttcgcgatcgggtacactgagacgcgctgcagtgcgacgggcgcggaaatcagcgtggacagtgtggacgcgttggcggtggccagtgcacgtagttcgtccgattcacccgaatcggacgaactggcgtcgttgtcaccgtcgccaccatcgctgttgccgtcaccggcgttcccgcccgtctccagcttcgtgatcagctccttcaccgtcgctgccgacgagtcgagtttcttcgcgatcgcgccgagcgtggaacggatggatgtcacattcgtccccacatcgcccgtcacatcgtccagatcgtcggcggtgctgctcagctgggtgatcatgctgtcggtttgggagatcagcgtgctgactgtggaagcgagcgcgtcgattttcggcttgacgttcgtggcgtaatcgtcgcgcacattgctgatcgactgcttcgcggaggtgatgcggttcaggatctcctcgcgggagctttccgcggctgcggcatcctgcgtgacctgcgtggaagcgtctttcagctgctgcgcgagcttctgcgaatcgcctttggcggcttccagcagcgtgatctcccggtcgatggcttccagcagcgcctgtttcgcggaatcactgtccggtagttgttccaccgattcgcgcatgtggttgaggcttgtgatgtacgtgtcgtacagcgattcgccgctggagacttgttcgctcaacgctgtcaactggctggctgcggtgtccgaatccttgccgagcgcatcgaacgccttgttcaccttggcagctacttggtcgaacgcgcctaacacctggtcgagcgcggtgttcactgaggaggtgacgttcgcccctgccgaagtgaacgacgtggcgcctgatttgccttgcttcaacgcgttctgggcctgtttgcccgccttggtcgccgaggcgagcagtttgcccgtggaatccacgatgtcgttcgccgagccgagcagctgcgaatacgacgtcacctgctgcgatgcgccgctcagcgtatccgccatggtggtgagattgccgttgaggttgcgcatgtattcggccatttgcgggctttgcgaatagtgtaggatgcttgaggccaggtcgagtccgacttgcgcaatcgttttggcgaaggttttgtcgattgtgttgaccacggttgtcgcgccctgatcggtgatatgcggggcgatcgggttgattttctcgttcagatagtacttgagctgcgcgtgtttgatgtcgggggagaacagcgtcatcatgtcggcgctgaaacctttcggaattacgatcgccgcatagtattcgccggatttcaccccgtcgattgccttgtcgcttttcacgaactgccagtccagctggtcgttggcgtgcagtgtgctgatgatggtttcgcccacgttgacgcgcaccggtatgagatccgacttgtaacccttgtcgttattggccacggcgaccttcaatgccttggtgttgccgtaggggtcccagctggccgcaatgttgaaccaggcgtacagcgccggcactaccaccaggcccatcgagacgatcacggcgatcacgttgcgggtggcgtggcacatgtcccgcttgaagatgccccagatcattttcactgttcgctcccctcctcacgccgactcctgccagcatttccgtccgtgtttccagccgcatattcagccgcatgttcagtcgcatgtccggccgaaccaccatgcgcagcctcatacagcctcgtacgtacggcatgcatcggcttgtaatgcatgcccggccggaacagcaggttctcgtgcaggatcgcgctgcggaactcttccgcactcatcgcttcctcgcccagataattcgcataccgttcgcgcagatactccaccacgatgagatacgtgtcgatggcgatgatcgaaatgatccaaccgagcagcatggcgagcttcatgcgcgtgatgaatagcaatagcaggaacacgaacggcagtaccgccagcgcaaggaatccccaacgcaccaggcgcgggtacaggcggaagaaatgaatcgcccgtctgcgggcgagttcggggaactcctcggcgatctgctgcgcggtctcggtgagccgcaacggttccaccgtgccttcgttatgttcggtgatcatcagatcagtgtccgccagacggttgtcgaacaggcggttgaggttcaacgccagcttgcggaccaccaagccgatgaacagtgccacaggcagataccagaacagcgagagcatgtcgatccaataatggttggcatacatgccgccgatcggcccgcgcatcgcgttgatgccgtaagtgaacggtaggaacggtttcagacggcggaagaattccggcatcatctcgatggggtagaggcctgccgcgcccggaatctggatgatcaccagaatcacggcgacggccttgccgatatgccggaacgccacggcgagcgcgtaaatgatgttcacgtagacgaacgaggcgaaaatgccggcgaggatgaacaggaacggatgctcgcattggatgcccagcgcgagatcgccgatcgtggcgatgatcgcctgcagaaatccgaccgtgacgaacagcagccaacggcccatatagccttggcgtggcgtgtacatgcggatcttctcatcgcggtccacttcaagcttgtagatcgcgacgagcacgaatccgccgacccacagcgcaagattcgtgtagaacggcgtgaccgcggagccatagtttttgaccgggtagaggacctgttcgtccaaatgcaccggctcgcccacgaacgagccgacctcgctcgcgtcaagtccgagcgcttgggaaagctgctggaacatcgccgaactgctcaacgtggccacatcggtgcgcgtggtgttgagctgtttggcgagactggcgagctgcgtctgcgtgccagcaatggtggtgttcgtttgggtcacggtgcgcgacaactggtcgagcagcccgttgccctgttccagcgtgctttgcagcgtggtaagcgtgccggacagcgacccattggccaggctgagtgtatcgagcccggtgttgagattcggcatgaccgtgccggtgatggtcgtgcgtgcgctcgtcatcgacgccgtgccgttcttcgccagcgtggtgacatcgtcgttgaacccgttcgcggtgttcttccccgcgttgatcgcagccgtggtgtcctgatcgaaggcgtcgatgcgctgctgctggaacgtcagctgtttgcgggcttcggcgagctgcgcggaaagatccttatacgtttggctgttcggatccagctggctggcctgcaacgccttctccacgccgtcgagcacggtgccggtggtggtgttgacgtgatgcatggtgctggacacttggtcgagcgcgtcctgcgtggtgttcagtccgctgagcacggtgccggtggcattgctcacgttgacctgcaggccggacagttgcgtgctgccgttgtcgagcgctccgaccagcgtgttcgagaatcgttcggtttgtgtgcgcgtctcgctcagcaagtcggacgccttgccgacggtgtcaagcgagttggtgattcccgaggcgagcgcgatgttggactgtttggccgaatcgatggtggtgagggccttgtcgagcgtggaacgggtgtcgcgcagctgctgttggacggtttcgagctggttgatggtgtcggtcagatcgttgatgacgtcgctttgcgcgcttttcacgctgccggtggtttctcccgctgcctcctttacttccttcgccacggcgtcggccacgctggaaacgaaagtggtgttgatctgctcgtcgatcgtggtcgcacccgtatcggtgattttcggcgcgatcgcgttcagctttttgttgatgtagtacgtgatcgacggtcggtcgcctttaccagtgacggtgccgattagtctggagctgaagtcttccggcagtacgatcgccgcatagtatttgccggattccacgccttcgatggcttgctgctcgggaacgaaacgccagccgagctgatggttcttcttaagctggttgacggtttgctggccagcgtcgagatgaccgaccagcgtggaggttgtgcccttgtcctcgttcgccacagcgacctggatgttgcccgtgttcgcgtacgggtcccagttggcgaggatgttgcaccatgcgtacagtgatgggatgatggccacacccagcgtgacgacgagcgccacagggttcttcagaatgcgtttcacgtctcgaaggaagatggcgaaaacctggtgcatcaagcctcctcgcgggtattggtcgcaacatctacgtgcgacggcatgcccgtgcgggaacacccggttgggctcttcgtcgcgcgatccggtggatattctatgacttccgatggaacgatcgcaatggtttcgccatgtttattggtcggtcccgcaagtgtcgggatatgagacgagaacgctcggcatatggccctagtggggcgggcgacctggatatggagtggacggtcgggaaaacggaaaggaaagatggcgaatgttgtcacatgacaagtgggatagggttgggcgataatggaggcatgactattgcaacgccggaacgttatgcgcaaatgctggacgccgcacgccgcggcggttacgcctatcccgcgatcaatgtgaccagcacacagaccctgaacgccgcactccagggtttcgccgaggcggaatccgatggcatcatccaggtctccgtaggcggcgccgcctacttctccgggcaacgcgtcaacgaccgcgtcaccggctcgcttgccttcgcagccttcgcgcacgaagtcgcggcgaaataccccaacatcaccatcgccctgcacaccgaccactgcgccaaacagtatctggacgaatgggtgcgccccctgctcgaccatgaagccgaacaggtgaagcacggtcaggaaccgaccttccagtcacacatgtgggacggttccacagtgccgctgggtgaaaacctcgacatcgcagaagaactgctcgacaaatcccaagccgcgcacaccgtgctggaaatcgaaatcggcgcggtcggcggcgaagaagacgggcacagcgccgaaatcaacgacaaactgtattccacgcccgcgcaaggcatcgccgtcgcgcaacgactcggccttggcgagcgcggacgctacatggccgccttcaccttcggcaacgtgcacggcgcatacaaaccgggcgtggtgaaactgcgccccgaactgctcgacgaaatccagaccacggtcgcgctcgcgattaaggccggcgaaatgcccgaccccgcgcactcgctggatgtcgctcccggtaagccgttcgccctggtgttccacggtggttccggctccgcgccggaggagatcgcgcaggccgtgagctacggcgtggtgaagatgaacatcgacaccgatacgcagtacgcattcagccgtgcggtggccggtcacatgttctccaactatgattcggtgctcaaaattgacggtgaggtgggcaacaagaagctgtacgacccgcgttcgtgggggcgcgaagcggaaagcgccatggccgcacgcgtggtggaggcttgcaggcagcttggcagcgcgggcaaggcgttgaagtagtgtgatgccgcacgcgccgcgtaatgcatgcggcgtgtggcggcacggtgggtgtgtcgcgttgtatgagacgaaaacgatggaactgactagttttaacggccgatcggtgcatatccggcagatatccggtagagggcgcaggatagtctttgtaaggccttggtaaggctttgaggcgaaatcgcatacgcgcggaggtgcaacaacatgcctggaattgttttgatcggtgcccagtggggagacgaaggcaagggtaaggcgaccgacctgatcggcacgaaggtcgactatgttgcccgcttcaacggcggcaacaatgcgggccataccgtggtggtcggcgacgaatcgtatgcgctgcacctgctgccctccggcatcatcagcccgaccgcgactccggttatcggcaacggtgttgttgttgatcctgaagtgcttttcgaagagatcgacggcttggaaagccgcggtgtggactgctcccgactgctggtgagtgagggtgcgcacattattgcgccgtatcatcgtgtgcttgataaggtgacggaacgtttcctgggtaagcacaagatcggtaccaccggtcgcggcattggacctgcgtatgccgacaagattaatcgcgtgggcatccgcgtgcacgacctgttcaatgctgagcatttgcacgacaagattgaggcaagcctgcatcagaagaaccagatgctggtgaagctgtacaatcgtcgtccgattgatgtgaacgaaaccacggatgagctgctcaagctcggcgaacgtttgaagccgtacgtggccaacacctcgctggtgctcaataaggcacttgacgaaggcaagaccgtgctgttcgaaggcggccaggccactatgctcgacgtggatcacggcacatatccgtttgtcacgtcctccaacccgactgccggcggcgcatgcaccggtaccggtgtcggcccgaccaagatcacccgcgtgataggcgtttccaaagcgtacgtgacccgcgtgggcgaaggaccgttcccgaccgagctgttcggcgaggaaggcgaatggctgcgagcccagggccacgagtacggcgtgaccaccggccgtccgcgtcgttgtggctggttcgatgcggtcgtcaatcgttatgcggctcaggtcaacggtttgacggatattgtgcttaccaagcttgatgtgcttaccggtttgaaggagattccgctgtgcgtcgcctatgacgtgaatggcgagcgccgcgacgatatgccgactgatcaggctgagtttgctgctgcgaagccgatttacgagagtatgccgggctggtctgaggatatttctcagattcatgatttcgatgatctgccgaagacttgccaggattatgtgaaacgtcttgaggagctgtccggttgccgtatttccgtgattggtacgggtccgcagcgtgatcacattattcagatcaactcactggttgactgattggcttgattgatgggcgttggtagttgtcggctgacggctacccgccagatgaatgccggtgggtgtgcgcctgccggcatttttgttgaagcaagtacataacccaagtttgttcgattctggtgaatcggacatgtggaacgtaggaaaagtgcaatagttgtccgtttctggtgaatcggacaaccagcatacagataaggagaaccagatgcctcagtctccctctatcaacccgctgatcccacgcttcaaccagctgaagtggaaaatggcgggtgccggcattcttgtcggcctgacgtccgggttgctggtggttctctatcgtctcggtattgaacgtggcactgacgcggcacgctggatctactcgcaaatccgcgtaaccccgtggctgttggcgccgtggttcgttgcggctgtcgcagcggccgcgcttattgcgtggatgattgccaaggagccgatggcgtccggtagcggcattccgcaaacgaatggcgtggtgatctgcggtttgcatatgcgctggcagacgattctgccggtccgtttcgtcggtggactttttggtgctctgtttggattgtcgttgggccgtgagggcccgtcgattcagattggcgcttcgggcgcgcagttcctgtcgcatcggttgcgtggcaagcgtcgtgaggacgtgcaggagcattatctggtgactgccggtgccgcagccggcttgtctgccgcattcagcgccccgctttctggcatgatgttcgcgctggagggggtgcatcgtagtttttcgcctgcgattttgatgggtgcgaccgcagcttctctgactgccgattttgtgtcgaaatactgttttggtttgcgtccggtgttggatttcggtgatattgggcagctttcgcttgacgagtatgtttggctgattccgttgggtgtgatcgctggtttggtcggttcgatgatgaatcggtcgttgcttggcttccagacgctgtacggcaaactgccggcatggagccgcccgatgattgcgattgcgatcgcgttgcctgtcggcatctggttgcccgacgtgctcggcggcggctcgaatctgattgataccgccgaacatgcgcgcgtcggcttgggaatgctgtgtctgctgttcgtggcgaagatgctgttcacatccacgagtttcggctcaggcgcgcctggcggtattttcatgccgattcttgcggtcggttcgttggccggcggcatctgcggtgaagtgttgcatcgatttggtgatctgccatccgacgcagtggcggtgtttgcggtgtgcgtgatgacgggcacgctcgccgcgtccgtgaaaacgccgatcacgtcgattctgttggctgtggagatgtccggaacgttgacgcacatgctgccggtcgctgccgtcgctttcatcgcgctgttggtgtccgatctgctgcgcaccaaaccgatctatggggagttgctggagcggtacgtgcgtgcgcaaggcatgcagatggcaatcgcaagccatgtgggcagcggcattatggaactgccattggaaatgggggcgattgcggacggcaagcgggtgcgtgacgtgcgttggccgtctgggtgtctgatcatcggcctgcgtcgcggcgaaagcgagatcgtgccgcgcggtgatacacggctgcgtgccggtgactatctggtggtgctgttcagtggcgaggaggagcgcgaggtacgacctgcgatgcggcggctgtgtgatgcccggcttgactgagcctggctgaattcggctggactctggatgtccgaatctgcggaatcggacatccagggtgcatacgttggcgctccgtgtaaactcatatgcgttaggaaggcggcaaccgcggcccagctcgttgttgcacggcctatgggcggaacaacgctgtccgcggaaggccagtacagggggagcgcaatggaatcgcaagaacaatcgccgggagacgtggtgactgcgggtgaggactcgcatcccatcacgcaggcaatcgacactgttgaggtgacgcatgctggtgcaaccacgccctccgctaacaccatggatccgcctacgattcccctggcaccgatgaaacgtatgcaggcgcggttcaatccgctcgccgacggactgatgtatgttgtggtgttcgtcggtggatttgttggagtcggctgtcggcatgcgttggatatgcttctgccgtcggtcagcgggacgccgttcgttgtgggcacgtttgtgtcgaatatggtcgcctgcttcctgttcgcgatgctgaccgaattcatggcgaccgcttcgtggctgcgtcgccgggtgcggcaggttgtcagccgtggtgttgggcttggcttgctcggtgggctttcgacgatgtccggcgtgatgctggaaacgatggaaggtctgcacgagcggcatatcgccagtgcgcttggctatcttgcgggaaattttgcaggcggtttgctcactgccgccgccggcgtggttctgatgcaggcactgctgtcacggagtactcgaaagcgggttcagggtgcgttttcagctgtttccgtgtccgattctgccgaatcggacacgcagggcgtacgccatgtgaaagtggccgacgtggcgcgttctgccgcgcaggccgcaatggaagccgcgcaggcggcgcagcaggccgcgcaggcggcccagcagattgcacagacgggacaggttccgcgagtcgaaacaccaaccgtgccgccgaccgccagccagactatgcagacgggccgcgttccgcagattcctccgctggccgttcctcagctggcacagccatcgcagccgttgctgcgcgagcaggatacttcagacttggggcagctgcccgagccgattcagcagtcgcaaccaatccagcagccccagcagcagtcgcagccgatccagcagccggctaacccgcttccgcccagcttcgagcccaaaccgatcactgcggagatttcgcttatcgccgacccggctaccggggaggtgcgctgatgatgtggatgatctgtctgttcggcggtcttggcgccatggcccgttacgtgctcgacgtgtcaattcaacgaggctggaatcgcgagaatcggagaacgaaccgcaacttcccgctatccacgctcgtcatcaatggcgtcgcctcgctatgcgcgggcatcgccatgatgtcctactattcgcaatcggtggatatggacacggtcatgatgttcgttgtcggatttctcggtggtttctcaacattctccacggcgctcaacgaagtggtttcattgattcgccagcgtcgttttacgctggctctgggctatggaatagcaaccgtcgcggtgcctctcatttgcgtggccaccggtttcggcattgcgctgctcgccaatccggcgtaattttcacgttacgcggacggtcgctgagtaacatgaaagaaatctgagcgcaaccgccatcaaggccgccagcccggatgcgacgctggtgattgcattcgaccagaccaagccgctgctgaaggatggcaaggatatccagtaccagggccagaccggtatcggaccgttcaataagaacaatgatccgagctccgcgaacatcggcgtctacgccttcgacaaagacaacaagccggtctttgaccacacccagtccggcgacgtgccgaccgactgatcgcaatgtaggtcatcatcaatacaagaagacggcgcaaagtgagtgtggatatcgcaagctttgcgccgtttcttttgttgtgctgtgctgccgttttccgtgtcgtgggcagcatacgaaaatcaatattgaaaatcaagtaaaggggtaaccccgttaagcgatatacacgccggactgtcgaacaggttcgagagaatgtaaatgaatgtaatatctcgcgagaagcgcacggaaagcgcgcggcaagcacgtgagaatacaacgatggaacagtgataacggggaaggtgcgatcatggtcggcatgcgcgatgtggcgaagaaggccggggtgtctctgagcaccgtctcactggtggtgaacggcaacgggtatgtatccaacgacatgcgcgaccgcgtgcgtaaggccatgcaagccctcaattacgtgccaaacgagcttgcccgcaacctgtaccacgatcgcacgaatctggtcggcgtcatcgtgcccaccattcgtcacccgttctttgcaacgtttaccgcgcacctgcagcatgcgctcgccgcgcaggggctgcgcaccatgctgtgctccaccaccgacgagacggacggcgaaatccaatacgtcgatatgctgcgcaggcacatgatggacggcatcgtcatgtgcgctcacacctcgcatcccggcgattattggacgtccatccaccgcccgatcgtcgcattcgatcgcgtgcttggaaatggtatttcgtcgatcggatctgaccacgagcagggtgggcgactgattgcgcagatgctgattcgcaatggcgcgcgccatgtggtgatgattggcggtccgcgcgatcagttcttcgatctggcggtccgcggcgaagtcgaggaggggtcgttcgatttgggaaagaccacgttcccgacggtgcgctactacctcacgttggaacaggaattgacctccgcgggcgtgaagtatgagtatatcgaggccggtgaggtgatggatttcgccggctatcatcgtgcggtcagccgtgcgcttgatggggtggcgaccgacggcgtcgatgccgtggtcagctccgatattggcgcggcgttctgcgtgcgcgaagcgttgagccgcggaatttccattcccgacgagctgcaggtcgtcgcctatgatggcacgtatttgaccgatttggccggtatgaagctgaccgcggtcgcacaggatttctcggcgatcgcgcagtcggcggccgaccatatggtgcaggcgatcgccaatgaagaggcggctgcggccaacgcctcgcgcaagaacatacccaagccgttcgagccgaacgtgcttattcccatgacgctggtgccaggcgataccacgcgttgatgctgcgcgttggaacgctgggttggggtcggacaggctgggctgcatagaacaccgcatcaaaccggttcgacacgcgcattccgctgtgtgactggacatcgacgcccctctcgaggtaatatcgaaccggttcgatacatacgtgagtatgcaaatacgtaaacaacaaacaggcagacgcgcacacattgcacccgcacccatgaaccaagggaggtcccatgaaaaacaaagtgcagctcatcacctacgccgatcgcctcggcgacggcaccctcagctcgatgaccgacatcctgcgcacccgtttcgacggcgtgtatgacggcgtgcatatcctgccgttcttcactccattcgacggcgcggatgcaggcttcgaccccatcgaccacaccaaggtcgacccgcgcctcggcggctgggacgatgtcgccgaactttccaagacccacggcatcatggtcgacgccatcgtcaaccacatgagctgggaatccaagcagttccaagacgtgcttgaaaagggcgaggaatccgagtattacccgatgttcctgaccatgagttccgtctttccgaacggcgcgaccgaagaggatctggccggcatctaccgtccgcgcccgggtctgccgttcacccactacaagttcgcgggcaagactcgcctggtctgggtcagcttcaccccgcagcaggtcgatatcgacacggattccgacaaaggctgggaatacctgatgtcgattttcgaccagatggccgcatcccacgtcagctacattcgtcttgacgccgtcggctacggtgccaaggaagccggtaccagctgcttcatgacgtcgaaaacgttcaagctcatctcccgcctgcgcgaggagggcgtcaagcgcggcttggaaatcctcatcgaagtgcattcctactacaagaagcaggtcgagatcgcgtcgaaggtcgatcgcgtctacgatttcgcccttccgccgctgctgctgcattcgctgaataccggtcatgtcgagccggtcgcgcattggaccgacatccgtccgaacaatgccgtcaccgtacttgacacgcatgatggcatcggcgtgatcgacatcggttccgatcagctggaccgttcgctcaaggggctcgtgccggatgaggatgtcgacaatctcgtcaacgccattcatgcgaacactcacggcgaatcgcaggccgctaccggtgccgccgcatccaatcttgacctgtatcaggtcaacagcacctactattcggcgctgggatgcaacgatcagcactatattgcggctcgcgcggtgcagttcttcctgccgggcgttccgcaggtctactatgtcggcgcgcttgccggcaagaatgacatggagctgctgcgcaagaccaacaatggccgcgatatcaatcgccattactattccacggctgagatcgacgagaatctgcagcgtccggtggtgaaggcactgaacgcgcttgccaagttccgcaacgagcttgatgcgttcgatggcaccttctcgtacagcgccgacggcgatacgtccatcagcttcacgtgggagggcacgaccactcaggccacgctcacgtttgagccgggccgtggtcttggtgtggagaacaccgcgtccgttgccacgctcgaatggcgtgatgccgccggtgagcaccgcacggacgatctgatcgccaatccgccggtcgtggcctgattcagcctcgcctgatccggtcgctgcctgaccgcgcataaatccataaatctgtaatcgtccttcctgtcacctctccttcaggaaggacgattcgcattttcgttttttcgagaaatcgtcttatcgggaaaacaattttcccgggaatcagctgaaatcccagcaaaaacgggtaaggtgagcttatgtcaaagatgtcaaagcttttcgatcaagacaacatgtttttcgccattatgggcgtgctgttcgatctgattattctcaacgtgctcacgctgttgtgctgcctgccggtcgtcacggccggcgcatcgttcactgcgatgcacagtgtgctctggcgcatggtccgccatgaggaaacgtatgtggcgcgccagtttttcgactcgttcaagcgcaatctcaagcagtcgctgctgccgtggcttgcgttcctgctggcggcgattgtgctggtggtcgacggcatgctcgcccggtccatggggtcgatgcgcgggccgctgatggcgtgcgtcgcgttcatgggattggtgattattgcgattgcgcagtacttcttcccgctgctttctcgctatgagaatccgacttccgaaacgttgaagaatgcgacgaaacttgcgctcggctttttcccgcgcaccttgtgcatgctggtgattttggccgcgttcgccgtgctgtatgcgcagtttttcatatatatgattccgctgctgattttgatgggcgtcacgttgccgcaatactgttgcgcgtggatctacaactggattttccgccgtatcgacggtgagatcgacgccaaggggcgcaaggtagcgcagtcctgaaattgtttgcccgtaaaggccgttccgcagattgcaagttccgcggaacggcctttacgcgttttcgtcgccttgagtgtccgattctggagaatcggacaactggaacgtacttttgggcgcgtgaatgcccgtttctcccgaatcggacaactacaggtcaaagtggggtgcttgaatgaccgattctggagaatcggacaaccgtgggtctgttttggtgttccggttatccgtttctggtgaatcggacaaccggaacatgttttgaggcgcttggatgtccgattctccagaatcggacacgctgggggcaggattagcaggggaggatggtggcgctgcgggctgggacgtgcagttgggtgccgtcgaagcgtgcggggttgccgatgctcagcagtactgttttctccgctggttcttgcgatatttcctgcgctaagccgccagacagcagtttcacatagtcgctcggcagtgtgcagcttgcgtcggtgtttgacggattgatggcgacgacgatgcgctcgccacctgcttcgcgattaatcttgctgcatgtttcacaaggtgtttcacagctggtttcgtgtgctgttccgctgcgttcgccgtcagttgcgtcgcgttcggcttcgccggcctcggagcttctcgcgtacaccagcggatacgcgtgatcttccgcgtagaggaactcgatgcctccgtcggcctgcagtgcgggatgtgccaggcgtagcgtgttcagtgcgcgtacggtttccagtagcgagtcgctgcgtccggtctgcgaagccacgttcgggcgctcgctgtcggcatcgatcggcagatacagatcatcgggccgggctgcggagaatcctgcgttggttgcgcagctccattgcattggtgtgcgcgatccggtgcgctcgtatccgccttccttggatttgagcccgtgcatgtagcgcatgccgatttcgtcgccgtagtagatgaacgggcagccgggcatggtcagcagaaatgtgaacgcgagcttcatttcatcggtggtcaaggtgtcgcgcatgcggatcatgtcgtgattgcccgacggaatgcagatgtatccaggcgttccggcggtgctggcaagcatggccgtatatgtgtccgcaaacgccttgatgtcgccgctcgcattgccgacattgtcgttattgcaatttggattgtctccgtcgacgactgaattgccgttgctgtcgcacccgctgctgcccgcgccgtcgcattcgctgcgttcgccgtcgtgttccgtttcggcagtttcggcgctgcccgtagcttcggaagatccggccgaaaaatacggattctcgcggaacaggtcaagataatgcgacggcccgaaatgcagcaggaagtccatgtcgaatccggcgtgcagcgcctcttcggggtcaccccattccgatacgagcaccgcttccgggtaggtttcgtccagatgcgctcgcacttgctgccacaagagtttcgtccaatagtggtcggggtcttccttgacgaggctgcctgccatgtccacgcggaagccgtccgctcccaacccgagccagaagtccatgatgtcttggatgagcagccggccctgcaccgcttcgggggagtcggcggcgaactgccagtcttcggtgacggtgccgaatccgtagttgaggcatgcctgcgtggagaagcagttcacggccgccgcgtcgggacgttccgcaatgcctccgaggaatccgcggattgattcgtatggcgagttcagattcggcgattgcgtcatcggtcgccagatgtagcggtcggtccatgcgttgcgttcgtccttgccggattcaagaaaccatggattgtcgaccgcggaatgcccgggtacgaggtcgagcagtacgtgcatgcctagttcgtgcgcgcgctcgaagagccgctgcaggtccgcgttgctgccgtagcgttccgcggctgtgtagtagtcgcgtacgtcgtagccggcatcgtagaacgacgagtcgaagcatgggttgatccagatcgcattgcaccccagatcgtgcacgtattgcagtttgtcgatgatgccttggaagtcaccgatgccgtcgccgttcgagtcgttgaatgattgcggatagatttcataaaagattgcgttgttgagccagcttgccataaatcctcctgttttcgcatctttgctgttggtctaccgatgtatcgcaacgttggaaacgtcggtcactgcttttccgtcattatagcccgtgaagacactttttaggggtgtatggaatgccaatgtttgcaatacgtcaatcgattgacgcgacacgccgacggatggcactgtgcacaaggtttctcgaaccggtttgacaactctcgaaccggtttgatatcctgtataccaaggacggagagattccgacaacgcgagtcggggattcaccttcctttatcacctcattgggcagggctgctcggtgaatagtggatagaaagggattggaaaatgagcaagttctcttcttggaagaaggctggcaccgctattgttgcaacgctgatgaccgttggcatgctgggagcatgcggatcgtcgtccagctccagcggcaccaagatcaccatcttcaactccaaggttgaaatcgaaagccaaatggaagacatggctgcgaagtactccaaggaaaagggtgtggacgttgaggtctactactccaacgacaccgtcgcagcgcatctcgccaccaagtacgcatccaaggatccgtacaccatctccatggtcgacgccaaggacatctactccttggctgaagagcacgccgtcgatctgtccgaccaggattgggtcaaagacaccgactacgccatcagcattaacggcaagacctacggcttcccggtctccatcgaagcccgtggcctgatctacaatgctgacgccatcaagcaggtcaccggtaaggaattcaagcctgagaactacaagacccttgacgagttcaaggatctcatcgacgagctcaaggccggcggcatggaatccccgaccggtgtcatgaaggaagactggtccctcgccgcgcacttcctgccagaagtctacgaggagcaggaagatccggacgccttctgccatgagctcaaggacggcaaggttgacctcagctccaacgccaagtggaactccctgatggacttcttcgacgtgatgaaagacaacaactacgccaagtcctccgccatctccgccgagcgtgaggtgaccgagcagaagctggctgaaggtgaaatcgccttcatgttcggcggcaactgggattggtccgtgctgaaccagtacgattacaccgagaacatgggtctcatgccggttccgcagaacactgatgacggctccaatgagaagctcgtcggcggcggctccaagtacttcttcatcgactcctccgacaacacctccgacgaacagcgccaggccgccaaggacttcctgaactggctcgccgaagataaggcaggccaggagttcatctccactgatgctgctctgatctccccattcaagaacaacgagatcgaagcatccgatccgctgggcaagtccgtgaagtcctacgctgacgccggcaagctgatcgacaactacaactacctgcctgacgaccacttctctgtgctcggcgccgccttccagaagtggctcgcaggtgaagaggaccgtgcaggcctcgctcaggacatccaggactactggaagaccgctaagttcaccggcgcaaccgcctgaacttccaaataatgcaccatgatgcagggtccgccgcttccttcctgcggcggaccttacatccccggcacgtatgggatccatcatgaaacagaataagctttcctataaaatcggccagtttctgatgttcggtggtccggcgacgattcttttcttcgccgtggtgatcctgccgttcttctatggcctctatctgacacttaccagctgggacggcgtttcgacaacgaagccgttcgtcggtctcgaaaactacaaggcggctcttgccgacaccgcatattggcagtcgcttggacgcaccttcatctactccgtcatcgccgtcatcctcaccaacatcgtcgcctttctgctggcctacctcgtgaccagcggcatcaagggccagaacttcttccgtgcgggcttcttcattccgaacctcatcggcggcatcgttctgggctacgtgtggaagttcgtcttcaaccgcgcattcgtggccatcgccgaagtggcgacgcaaacagaccacgcatcgctgctctccacgccaaacggcgcaatgttctgcttgatcctcgtttcggtctggcagtacgcaggctacatgatgctgatttacgtggcaggcttcatgagcgttgaccagagcctgaaggaagcggccatgatcgatggctgcaacaagggcaaggccatgtggcacgtggtcatcccgctgatgcgctcctccttcgtgcagtgcatcttcctgagcaccacccgttgcttcatggtgtacgacctgaacctttcgcttaccaagggcgaaccgttcaaccagtcggtgctcgcggcaatgcacgtctacaaccaggcattcgtttacaagaactatggcaccggtcaggcggaggcgttggtcctcttcatcgtctgcgcagtgatcggcatgctgcaggtgtacttcggcaagaagggtgaggtggcagcataatgaagggtcaaaccagcactcgcaccaaggttctgcatgcactgatgatcgtcgttctgacgattctgctgctgctgttcatcgcaccgttcattctggtcgtgatcaacgtcttcaagaccaaggcggacatcaacaccgctccgctggcactgatcggcaagcacgggttcaccctggagaacttccccagggcaatggacaagatgaacttcgtcaccgtgttcggcaactccgcggtcatcaccatcagcgcaaccatactgaccatcctgttctccgcgatgtgcgcatacgtgatcgtgcgcaacccctcgtggaagttcggcggcatggtgttcgcacttatggtggcctccatggtcattccgttccaggtgctcatggtcccgctcgtgtccgtctacggcggcctgcttgacgtgttgaacagtcgtatcacgctgatcctcatgcacaccggcttctcggtctccctggcggtgttcatgttccacggtgcgatcaagacgaacattccgaacgaacttgaggaagcggccagcatcgacggctgttccaagtggcgcaccttctggacgatcgtgttcccgctgctcaagccgaccgtcgctaccgtcgccatcatcgacgccatggcgttctggaacgactacctgctgccgtccctggtgctgggccgtcgcgaactgtacaccatcccgatcgcaacccagatcttctacggcacctactccaacgatatcggcctgatcatggcggccctgctgctggccatgctgccgatcctcatcctgtacctgttcctgcagcgctacatcgtcgaaggcgtgacctccggcgcagtcaagggctgatcgaacggtacggaatccgcaatcataactgaacagactcacacaaccggtccggatgcgaagcgataatcgcatccgggcttttcttatgcgatatcgattcttatgcgatatcgatattgagattgccatcgcatgtttctgctgtctgacaggacgtattgatatggttgatttcgccgaaagaatcgctcgaatgcactggtgcagtgtgtccgggcgattttcatatgtgctgaatatcgtgtgacatttcgaaacgagcaacgaaatagaagcaagaacgagaagcgacgatacaaaacaggaaaaacaggaatagaaataagagatgactgaagacaatcaacataatgcaggtgagcagcagactccaatgcagccgcagccgctgccgggccaggtgttcgtgcgccccggtatcgatgaccgtcccgattacgaaaaaacgctgaccgaagagaccaaagcggccctgaagcgcttggccgtacagcagaatccgcgcgtgcccgaggcttccaacgagcgtccggaagtgcagcagaccctcatcaacacggaaggcggctccccgctgaccgcgttcgcccatctcgacgccgctgtgccgaacctcgaatcgtcgttccttgacctgcgcgatccgatgaccgcgcccgacggcaccacgcccaccaaaccgcaggtgcatcgtctcaccgccggcttcgcgcttggtgcgctgctgttcaccgcgccgatggccgcgctcaactctgtgctcattccgcagaccatcagccgtctttccggcaccgaccgcgtcaccgatctggcgctgctcagcgtcgtcggcacgttgttgacgttcctgatgaacgcgtggatttccgtcggatccgaccattcgtactgcccgctgggccgccgcaccccgtggatcatcgccggcacggtgctgaccgccacgtcggtggcgattctttccgcatgcgatttcatgccgttggtcatcgtgttctggctgtttacgctgatcggacatgcgatggtatcgatgccgctggcggccgctttcggtgagcgcgtgcctgacaagttccgtgatcgtgcggacgcgtggcgtggcgttggccaagcgttcggccaggtgttgggcattatcgcggccgtttcgattacgtgggctgccgacgattccggttgggatggcaccacgcgtttcgccatgatggtgtttgcgttgtgcctggtggtggctggtgtggctacgttgctggtgttgccgtttgagggttccagcagctatttgcctcgtgagggtgtgaagaagggcgattatttttcgcagtatcgtccgccgaagggcgctccgaagttcttcattgcgtttgccgcgcgcatgtttgccatcgcagccacttccggcattgcgatttaccagtggtatcttgcgcaggatggtttgggtgatgtttcgcaggtcaccatgtttggtttgtccggagcggctgcggttatgtcgatgatggccgttgccgcgttcgtcggctcgctgttggctgcgctgctgcttggccgcatcgcccgcgctttcaaagattcccgtattcccgcgattgccgcctgcttgttatttgtggttgctgtggtgcttccgttgacgccgatcgatagtgctatggcggtcgcgctgtatgcgctgtttgcaggtttcgcgtatgtggtgtatgacggcgtgagccaagggttgaatcttgcgacgttgccggatgtgcgttccgttggtcgttcgttggctgcgttcagtttggcgaatacgttcggttcgttgattggcgctgtcgtttgcgcgattgcgattgcggtgactggcgagtatctgctgattttcgctgttgccgccggttgcatggctgttgcgggcgtgctgacgttgctgctgaaatgatttggatgacctgagataatccgaaaaacgaatatcaaattcaaaattgcgcgtccacatagtgaacctttagtagaaagggtctgtggacgcgcttatctttacggcttagttcgagcggataatccgccgaatacaagactttgcgaaaggaggttcgccacgatgaacggaatggttgcacgcgtactgctgtccgcacgaattattattccgctttcgttggcggactgattcgagcaatgcagcttcaatccctcgccaacggaggcagggtttgaggcgcgcaaaacacacacgttgatggccctgcatgctgcggggtctttttgttgccgcccacaaggcgtaaggcaacgaaatgaagactgcacacaagagaatagaagaaagacgttatcggcgcatgttgggagccggcaacgcatgacagacgtaacaggagtaatccaatgagtgcagtcgaagcagccgctggcaaagcgcaggcaatggtgcgcgattcggtgaaaaccgttatcgccgcttccatggtcggcactgccattgagttctacgacttctacgcatacggcaccgccgctgcgaactatttcccgaaggtgttcttcggagacaccaccaatccgactgtcgcactgctggccagcctgctgaccttcgccatcgcgttcatcgcacgcccgctcggatccttggtgttcggccatttcggcgaccgcatgggccgcaagaccacgctggtggtttcgctgttgaccatgggcatcgccacgttcctgatcggctgcctgccgacttacagccagtggggcattgtggctgtcgccgcgctgtgcctgtgccgtttcgtgcagggcatcggtctgggcggcgaatggtcgggtgccgctttggtggccaccgagaacgctccggaagacaagcgcgcgctgtatggctccttcccggaattgggcgctccgatcggtttcttcctgtcgaacggtacctacttcctgttggaaacgttcaacgatgacgatgcgatgctggcatggggctggcgtgtgccgttcctgctgtccgcagtgctggtgatcgtcggcctcgtcgtgcgcgtgcagatggaggagaccccgatcttccgcatggcccaggagcagaagaaggtcgtcaagtccccgttgaccgaagtgttcaagaagagctggaaggaagtcatccaagccacgttcctggtggccgtcacctacacgctgttctacacgctggcaacctggtccctcgcttggggcaccaaaaccgtcgagcagggcggcggagaccttggtttcaccaatcgtgaatacctgctcatgctgatgcttgccatctgcgtgttcgccgcgttcatcgtcatttcctgcgtgaacgccgataaattcggccgcaagcgcgtgatcgtcatctcgtcctgctgcctcgtggcattcgcgctgctcttcccgttcctgcttgatccgtcggtcgtcggccagcgtaacttcgccgccaacctgctgttcctatgcatcggcttcgcgttgatgggcaccgcattcggtccgatcggcgcgttcctgccggagctgttcgacgccaacgtgcgttattccggctccggcatcggctacaacctggccgccatcgtcggcgcggcattcgtgccgaccatcgccacttggctgtcccaccactggggtgtgcactccgtcggtctgtacctcggcgtgatggccgtgtgctgccttgttgcggtgctgagctgcaaggagactaaggatgttgatttcaccaagtgatcaatcgccaagtgccgtttgaccggctattcagcgacgtgtcaagatgacatcgacggaagccttactaaaaacgtttgacgcgaatataaccactatgtgaacgtcagcaaccaatataaagaaagcgggactaaaacagttccgcaggagaggcggggtggttcctcggacacaatccggggggagtaatctcctaggaaccatcgcccgctgtgaacaaccgaaacaagaattaaatatcgcgagtttgttcgggaatgcaagtcccgaatcgctataaaaagaaaaataaaggagcgcctattatggcagcaactatctggtacgagaaggatgccgatctgtccgtgttcgatggcaagaaggtggccatcctcggttacggttcccagggtcacgcccacgcgctgaacctgcgcgattccggtgtggatgtcgtcgtcggcctgcgtcctacctctaagtccgtggaatacgccaaggagcagggcctcgaggtcaagcctgttgccgaggccgttgccgaagccgacgttgtgatgatcctgctgcctgaccagtaccaggccgccgtgtacaagaaggacgttgagccgaacctgaagccgggcgctgctctggctttcgctcacggcttcaacatccactacggctacatcaagccgtccgaggatcatccggtgttcatggtcgccccgaagggcccgggccacatcgttcgtcgtgagtacgccgccggccgtggcgttccggtcgttgtggctgtggagcaggatccggatggcaagacctggccgctgtgcctggcttacgccaaggctctgggcgctctgcgcgcaggcgccatcaagaccaccttcaccgaggagaccgaaaccgatctgttcggtgagcaggacgtgctcatgggtggcatcaaccacctgtgcgatatgggcttcgatgtgctgaccgaggctggctaccagccggagatcgcctacttcgaggtgttccacgagctgaagatgctggtggatctggccaacgagggtggtctgaacaaggctcgctggagctgctccgacaccgctcagtacggcgattacacctccaccgtcatcactgaagagaccaagaagcgcatgcagtaccagctcaagcgcattcaggacggctccttcgccaaggagttcatggatgatcaggccgcgggcgctccgaagttcaaggagctgcaggaagagtacagccacccgcacctggagaccgttggtccgaagctgcgcgccatgttctcttggaacaaccagacggacgccgatgccgatatggccgagtccttcaacggcaagatcgctcgtacccaggttcagtgatttcgctgtagcggctgcatgttaagggccgatgaataacgtagtagcgcaatacacgcgaaacgtgttggaagccaccgtctcaccgcggtggcttcttttttgttgctgtgttgttttatgactgggatatttcgtatgcgggatcgcagtactgattgtcgggagagccgcacggctaggcggtggcccactttgtggactcaatgcttatttaggaagggacgggagtaggatagaccccagtttgcaggacaaaatccatgcacaaaaacacgcgaattcatctgcgaatggtagaaacccgagcgccgggaggcgttcaccccactacataaaaaggagtgccaagtacaatggctgcacaaatctggtacgagaacgacggcgatctctcggtcctcgaaggtaagaaggttgccatcatcggttacggttcccagggtcatgctcacgctctgaacctgcgcgattccggtgtggacgtcgtcgttggcctgcgtccgacctccaagtccgtcgagcacgccaaggagcagggtctggaagtcaagtccgttccggaagctgctgctgaggccgatatcatcatgattctggctccggatcagtaccagcgcaccatctgggccaatgacatcgagccgaacatcaagccgggtgcagctgttgctttcgctcacggcttcaacatccactacggctacatcaagccgtccgaggatcatccggtgttcatggtcgccccgaagggcccgggccacatcgtgcgtcgtgagtacgccaacggccgtggcgttccggtcgtcgtggccgtggagcaggatccgcgcggcgacgcttgggacatcaccctggcttacgccaaggctctgggcgctctgcgtgcaggcgccatcaagaccaccttcaccgaggagaccgagaccgatctgttcggcgagcagaatgtgctcatgggcggcgtgaacaagcttgttgaaatgggcttcgaggtcctcaccgacgccggctaccagcctgaaatcgcctacttcgaggtctgccacgagttgaagatgctcgtcgacctcatgaacgagggtggtctgaacaaggctcgctggtcctgctccgacaccgcccagtacggcgactacaccaacacctgcatcgacgagcacgtgcgtgagcgcatgcagtaccacctgcagcgcatccaggacggctccttcgccaaggagttcatcgaggaccaggacgctggcgctccgaagttcaaggctctgcaggaagagtacggcaacgtccgcatcgagaccgtcggtccgaagctgcgcgccatgttctcctggaacaacggcaaggatgacgacgctgatatggccaccttcaccggcaagatcgcccgtggctgatgtggctcattcggctaatcgctgagtcttttacaagaccgctgcccttacgggtggcggtcttttttgtatgttctgtcgcatattgttctaggatagatatgtacggtttcttacggtttttctataggaagagatgtcatggtcactgcgactggtcccgcacctggttctgaaatgacaacgtcggctgaacctaccgaagaccgtagcacgtcaggagttctgcacgtcgccgcgattttcgcctcgcatatggtgttgcagcgtaacaagcccatcgccgtgttcggcgcgcttgatgccgattgcgccggacttgaggtttccgcggaaatccgcgatttcgatggttccgtgatcgtgcaggcgcatgcgtacgcctccaaagagatcaagaacggtttttcaccgtggcgcgtcatgctgccggcacagcccgaaggtggcccttacacgttgcgcgtcaccgcaggcaacgatttcatcgaatattatgacgtgcttatcggcgaagtatggctggccggcggtcaaagcaatatggaacttgaattgcgcaacagtgaagacgccgaggaagccctcgataactgtgccgatccgttactgcgcttctacaatgtgccgaaaaccggtgtgatcaatcgcaacgccgaacatgcggcaagctggcaggaatcatcgcctgaaaatagtggcgtaatgagtgcggtagcgtactattttgcgcgaaaactgcgtgatgaacttgattccgaccttccgatcggcattatcgactgctatatcgggggtacgtcgatcagttgctggacgagcgaagatgcactgaattccagcgaatccgggcgcggctatcttgcgcgctatgagcaggcgatcgcaggtaaaacgcaggaacagttcgatttggagtacggcgaatggcagtcgcgttctgatacgtggaatgcgtcgatcgcagccgcccgcgaagacgatcctgatgtgacgtgggatacgctgacccaacagtatggcgaatgcccgtggccgccgccgatgacgccgacctcgcagtggcgtccgtcaggcgcgttccatgccatgctggagcgcattgtgccttactccttggcgggattcctatggtatcagggcgaggaagacgagccgtattgcggatcctaccgtgagttgctgggcatgatgattggtgaatggcgtgcgctgtggagcgaaagcctgccgttcctgatcgtgcaattgccgcagtggattgacaagaaggtcgacgagggcgacggcgatccgatgctgtggccggtgttgcgcgaggcccagtgggatgccgcgcagtccatcgacaatgtgttcgccatctgcactatggattgcggcgaatacaacaacattcatccggttgataaacgtacaccgggcgagcgtctaggcaattgtgcgcttcgccaagtgtatggtatgagccgtattccggtgtatgggccgactgtgctgggtttccgctgcgacgaaggcggccgcgtacgcctgttcttccggtacgcgcacggcctgcatttcagcggtactgcgcccgacagttttggtgacgagttcgccaagagcctgccttcgctggtgcgtctgccggaacgttccggtttcgagcttgccggtgccgatggtgtgttccatccggcctacgccgcgattttcgtggattgcgatattgacgatctggtcaacgcaaaggtcaacgtggtcgattacaacgccacggaattcggtattccgatcaacagccgcagtatcggcacgattacgttggccacgccggaagtgccagcgccggtgatgatgcgctacgcatggcgtagctggggtccggcaccgttgtttaatgacaataatctgcctgctcacccattcaagctggacctgaccgatcacaccgactctgatcacgctgaataatcacgttagatagttgcgttgaacggctgcgtcacatgattgtcgatagttgacgatgaatagcgtgcgattgctgtgcttatagtgtgctgcaatcgcacgctttatattgcgattgaagtcctgctgatcgcacgtcagtcaaatacgaatcaaataccagtcaaataaaaaatcgttgaaaaatcaacgtttctgcgatttatgccaccaaaatcgcagaaacgaatcaaataaaatgcgctgcactgcgagcgcataggctattgccagaggtccgggccgaatgattccaggtatgcggtcagttcggcggccatctgttcgtcttccggaacgcgcggatggccatccgtgccgcaaccattgcgtgaatacaagaaatgttttacgtgaaactcgccctcagtgccgcggccgttgccgtggaagatggcgtggaacttaccgccacagccaagagctacgtgcgcgacctgttctgcatggcagataaggtcgacgcgaaggcttcggtggccgagggcatggtctcgctgcttccgggcgaaagcgtcgtgctgcatatcgccactgccgatgccgcagcgcttgccgctccgggtgcgttcgcagccgccaacgtgccgcgttccgccaacgatccgaagcgcgaatggtgagcttccgcgagtacgccgtctactgaagcggtagaagagtggatagaggactactgaaatttcagttgacgtgttcggttgagtaaaaacataagttgaagcgccgccaaccttaagaaacgaaagtgttgtgaacgctgacttttcaagaggttggtcggcgcttttactgtacgatgtagatgaaccgtttaagttgcgatttaagttaagaagaaggacacggacatgcctattcaaaaaagcaaggtgacgatttttgacgttgccaaggcttcgggagtctctagtagcgccgtttcgtatgcgctcaacggcaagtctggtgtttccgatgtgactcgagacaaagtgttgaaggtcgcacacgaactgggatggaagccgaatggcgcggcacaggcgctggccaaggcgaagacgcagcgcgtgggtctagcgctgggttacgacccgaagctgctttccgtcgaatcctacatgatggaacttatttccggtcttggcgccgagctggaaaaatacgattattctctgctggtacgcatggccgtgggtgaggacgcgaagctttcgatcatcgatgattggattgctactggcaacgtcgacgccatgctgctcgtcaatgtcgagcttggagacccttgcgttgccttgcttgaggagcatgaggagatgccggtgcttgccattgccgatgcctccgtggtcggcaatctgccgagtctgtcaagcgccgacgccgatgccgtgcgccgagcggtgcgatacctgtatgatctcgggcatcgtcagatcgcccgcgtcggcggtcccgaatcgcttgcgcactcgtatattcgcgattccgcctttgcggacgtcgcttccgagctgggcatgcgttatcgttgcctgcacaccgactacacgccggaaaccggtcgcgaggccacgaagcgcctgctggcgttctctgagcatccgacggcgatcatctacgacaatgatgtgatggcgttggctggccttggcgtggcagcttcgcaaggcatcaaagtaccggaggaaatctccatcatgtcgtgggatgattccctcatgtgcaccgcggcgtatccgaacctgaccgccatgggccgtgacgtggtcgataccggtaagcaggccgccggattgctgctcaagctgatcggcggcgagcgtgtggggcatctgatggaagggccgtacgaattgcgtgcccgcgcttcgaccggtcccgctccggcagcggaataagatgcgatgatgagttaatgcgatgatgaattaaaaaattgcgattgcgcatttgctgcgccccgacaagggcaggatgaaagcgagcagcgagccgatcgcggcgatcgccgcaagggttacgccatacaggattgcgacggtgttgccggactgcttcgacaggtaccacaggtcgaacggcgcgagtccccagaacagcccgggaatcgcggattggaaatcaaaatctgaaatctgaaatcgtaatctgaaatcaaaaagcgcccgtgcccctcgcttgaggcatgggcgcattgttgccttacgacttcaggcgcgcttctgtgtgatctgataggcggcgaacagcacgaccagccaaatcacgccggcgaccactgcgatgcgatagcttgcggagaagcacatcagcaccacgaccagcagcatgaacgcgatcaccacatacggcgtcaccttggcgaacggcagcttgaacgcaagtttgtcaagtgcttcctggcccttcaatcccttcaaatcattcggaccgtcgccggcggcgacaacgcgacggaacttaatttccgtaatcatgatcatgatccaattgatcgcagcggcgatcgtggcgatcgacatcaaataattgaatgcgaaatcaggccacacgaacaccacgaccacggcgatcgcaataatgatggccgacgtgatcacacccccgaccggaacgccgcgcttgttcagacggcccagatacgagggcgcattaccctgcttcgccaacgaatacagcatgcgcgagttcgcgtacaggccggagttgtacacgctcatcacggcggtcagacacacgaaattcagaatgccggcggccgcgtgcacgcccaccgagtcgaaaatctgcacgaacgggctagaattgccgtcgatcgtactccacgggaccacggccatgatcacgccgagcgcgcagatgtagaacacgagaatacgccagataatgccgttcgtggccttcgggatggtggtgcgcggattttcggtttcgcccgcggtgatgccgatgagctcagtgccaccgaagctgaacatcaccacgaccagcgccatcagcaggccggtccacgtgccgtccgcattgcgagacatcaggccgtggggcaggaatccgccgtcaacggtgaaccagttggcgaacgacgcgcgaatacccgaagctgtcggcacgttcgcgatgatcacatacaaaccgccgaaaatcatggcaagcacggccacgatcttgatgatggcgaaccagaattcaaattcgccgaacttgttcacgcccataagattcagcgccgcgatggccaccaggaacaccgccgccgacacccacttcggaatgttcgggaaccagtaattcacgaacgagccaaccacggccaactccaccatggccacgagcacgtagttgaaccagtaattccagccggaaataaagccggctctcttcgaccagtactgcgtggcgtaatagctgaacgcgcccgccttcggatcctcgaccgccatttcggacagggcgcgcacgatcaggaaaatcgccagaccgccgatcagataggcgagcagaatggccgggccagccagctgaatcgactcgctggaaccatagaacaggccggtgccgatcgcaccacccaatgcgatcaattgaatatgacgattcttcaaagacttgcgcagcgtcggcggaaccggcacatcgtcggtttcgcgcggtttcttcgcaacggttgcgtcgctcatgaatgcttcctcttcttgggtgcctcggcaatattcggcaaattcggcaaaagtttgcgatcttggtgatattgcgttcggcagtagtggtaggtgacgcgcctatggtttttggcatggcacgtcttccccgattgtagctgtagcgcgtggattcggttccgtagtgttcaatagttcgataattcaataaaatgaaggttctgagagcaatggttggcactgcttgaacgctgcggggctggaggtcgtcatggcattcgtcaaagacatggtgcgtatgtggttgcatgcgtggaagcgatttgtctccattgccatgatcacattgctgggcgttgccgtgcttaccggcatttacgcgggatgccgagacgcttttctcgcgacggatcgttttttcgacacccaaggattgcacgatattcaggtgttgtcgacggccggattgactgacgacgatattgccgcgctccgtaaggtttccggtgttgcgaaagtgcagggcgaacgttcgcaaatcgtgacggtcgatctgaacggcaaaaaaaccgtgaccatgcaggagatcggcacgaatggcattgaccagccgtatctgcaaagtggccgtatgcctgaaaagtccggcgagattgcggtgacgcgcaaattcatcaaggattccggatataaaaagggcgaccatattacggtgacgccgcaggattcggcgtcttctgcttcttctgcggcgtcttccgtgtccgattctgcagaatcggacaaccaaacgggcgaaaacgggtcccagttgtccgattctggagaatcggatacgcaggatggcaaaagtgccgcacgggtgaccgattctggtgaatcggacaaccagacaccgagcttccctaccgaactgaccattgtgggcgtggtacttgacccgcaggatctcaccaatccagacggctattcgggtacgaacgcgttccgttcctccgctaccagcgactacacgttctttgcgccgtccgacggtgtgaccggcagcatgtacacggccgtcaccattctcgtgaaagacgccgccgacaaggactcgttcagtgacgcctatgacgacaccgtcagcgaagtggctgaccgtatcgacgggaaggtacgcaagaatcgccagcaagcacgccatcaggaactactcgacgccggaaccaaacaaatcgacgaggcgaacgcgcaagccgacaaacagttcgccgcagcgcaacagcagatcgacagcaatcgcagtcaactcaaccagcaaatcgaccaaatcgtcaatatgcaggcgggcgcggctgcaggatccctcgacgaaacaacccgtgaaacactacgtgaaacggtaattgcctcaagcccgcaattagcggaagccaaagcgcaactcaaccaggcgcaatcgaaattggaccagcagaaaaaagacaccgaacagacactgcaatccaagcaaaaagagctggaagacagcattccgcaagtgcgttggtatgtgcaggaccggtcgcaaatcggcggattcagctcgctgaaatccgatctggaatccatccgatcgctgggcaacgcattcccgatcgtgttcttgctcgtggcggtgatgatgagtctgaccgccatggcgcgcatggtcgaagaggatcgcgggctgatcggcacatacacagggctcggctacgggcgtcttgcggtcgcctcacgatacctgttgttcgcgctgttcgcctgcctgatcggcggtggactcggcctgatcgcaggcttccttggcattccggcgttcctgctcgtcgtattgcgaggcttgtatgtgatgccggacgtacgcttggaatacgactggctgtatggaacggccggagtcgcgctattcgtaatcggcgtgcttgccgcaaccgtgtatgcgtgcgcgcaggaaatgcgacagaagccggccaatctcatgcgtccgaaagcgccgcgtgcaggatcgcgcattctgctggagcgtatcaagccgttgtggaatcgcatgagcttccttggcaaagtcacggcacgtaacattttccgcttcaaatcgcgcttgattatgacggtcggcggcgtggccggctgcaccgcgctgattgtgtgcggacttgcgatcaacgacaccgttgccgcattgggcgcgaaacagtatcaggacgtgtatcagtacgatttgatggtggtcgcgaacgatgatgacgctgatgcgatgcggcagaaagtcgcttcggatggtcgcgtcacgtcgagcatggacgtgcgcgttgaatcgggtgatttgaccggcgattcggggagcgaaagcattcagctggttgccgtgcccgacagtgaacgcagcgagttcggcaagatggtcacgttgcggccggtgcgctccagttgggtggatggtgcggccgatacggtaagtctgggcgatgacggcgtgatcgtatcgcagtccgcggcaagcgcgatgggcgtcaaagcgggcggtacggtaacgctgaccaacggtgacgatacgcaggccgaagcgcatgtcagcgcggtaatccgcagcgtgatcgggtcggacgtgtacgtcagcgaaacctactatcaccagctgttcgacactgctacatccggcacgccttccgcatcttccttgtccgattctggtgaatcggacaatcaaaacggcgaatccggtacctcgaatggcacgtcgtcaaacggccaacaattggtgtggaacgccatgtatgcgaatctcaagggttcaggcgaatcccaggccgtctacgcggaaaagctggaagacgacgatgcggtcatgaaagccgtgagctgcgcgcacatggcggaaagcttcaaattcgatctgatgggcgcggtggtcgcgctgatcgtggcgctcgcgggcgggctcgcgatcgtggtgttgttcacgctcgccaacaccaacgtgtcagaacgtgaacgcgagatggccacacttaaagtgcttggcttcttcgacaaggaagtgcatcattacgtgaatcgcgaaatgatggtgctcaccatgatgggcgtggtgttgggcttgccgctcggccgtttcgtcggcggattgctgacggctgcgttgaatatgcccgcactgtatttcgaagtggaatgcacgccgttgagttatgtgattgcggccggcgcgaccatggctttcgcgctgctcgtgcagctgttcgtgaatccggtgttggatcgtatcgacccgatcagttcgctcaaatccgtcgaataggcgcatgtctgaaggtccgattctgcagaatcggacaactagacgggtaaaagtgcgttacggttgtccgtttctccagaatcggacacttagagtgccggaaaggctcggattcgcgtttcagttcttcggataacggtagttgtgtggcagttgcgtggtgagctgcgggtccaggccgagttccttcaactgccggtcgatttcgcggcgcgcacgtttcacaagttcggctcgatattcatcgccatgtcccatcgttcccatcttctccagtgcgtccaatgtttccgccatacgcttgagccggtcctgatggtgcagcagcgcacgcacctgcgcatgttcgcgtacgatcgtccgccaatcggatggtgtgtgtgcaatctcccgaaccgcggtgaccggatgtacgtcggccacctgatatgtgatcgagccaagcagcggcattaggaacaccgtaatcgcgccggctgcgaccagtgttgacgcggtgtcgccttgcatggtgccgaccttcaccgccagtgacgtgacggcgacgatgatcggcagcgcggtcgtgcaatacagcgctacggtgacgcgatgatgtgatgacagcggattctcgcgtttgtcgagcgatagcgcaacatatacgggcaccgcgcgaatcagcatgagcattacgatgaacgcgacgagcagcgcgggtcggcctgccacggcgcgtacgttgatcgcggcgcctgacaccacgaagaacacaggaataaggaagccgtagccgacgccttccagtttcatttccagcgacttgctgccgtcggggatgatgtaacgcaggatgaagcctgcggcgaacgcgccgagcaccgcgtcaagttcgaacagtgcagaaatggtgacaaggaagatgagcaggaatgtggtcagtcgcatgagcgtttgcgatgacgtgttcgcgttttccgtaaggaaacggtacaggcgatggccggttttcagtgctttcgtgggtagcattgcgcacagtaggcagatggtaaggaacgcgccgagcacgagcatggtctgccagccggttcgggtggataacagtatggccatggcaaggattgggccgagttcgccccacgttccgtacgagatgatggcgtcgccgatgggggtgccttcgaggttgcgttccttgagaatcggcatgagcgtgccgagagcggtggtggtaagtgcgattaccgtggcgatgccgtcgatgccttgctttgcgaagaatggaagcagggtcacgacgagtccggcgagccccaaggtgatgatccatgtgacaaggccgactttgccttgatgtccggcgagtcgtttcgggtcgatttcatagccggcgagcaggaataggaacgccatgccgagctcgctcaagagtttcacggcgtcgttcacctcgattacgcccagtccgtacggaccgagtgcggctccggcgacgagcagcagcacggtttgcggaatgaaccttcccggaatcagctgcgccacaatcgggctgacggccgccaccgccatgatgatagtcaatgaaacgagctcttgcgtcatgtttctagcctagtgaggctgcatgacggtgttcagagacgtgataccccatgatgtaccaaaagggtacgctagggcaaggctaagtttttgtaaattttatgggggtgggtaattctataccaaggtcgatccggacggcaagggcatcgggaacgtcaccttccagatgaaggatggtgacaccgtactgtatttcgtgaagcagaacgatggttcttacaagaaggctgcttccgccgctacctcggacgcaacgcccgatgttaagactgacgccaacggcaaactgaccttcaccggtcttgacgccgccaaagttgccgaaggttcgaggcttactggcgatttcgttgccttataaacgcactaggtagggtgcgaagtccgtccggaacgccatataatgttcctgtattaggcggtttaagggggtcttaaactgatggcagacattttgcgagggggctcgtgcggcgggtcgagaagcaacgagtcgcaagatacacgcacctacgttccgctgacgttcgccgaggctaccgatgtgtccgaagagattcgcgagcgtcgcgccgacgtgggtaggtccattgccctgcgtgtgcttgcggcggttctgattttctccgcgattggcattggtcttttcccgaagatgttgcaataccagtccgcgcaaaagctggcgagtacgtccgcccgttccgaacggagcgtcgcgggctggccgtatccgcaggccgacgaggcattcgccgcagctggggcgtacaacaagcgtctcgccgaatcaggtcagccggtgattggcgaggccgaggatccgctcgccgagttgtactacaacgatcagtccgacttcaacgacggttccggtttcagctcgacgggcacagtcgccaccggcgatggtgataagaattccgctagctccaaagacgcggaataccagcgcttgctggatactggcgatggtgtgatgggctccattcgcattccaaagatttctgtggatttgccgatctatcatggcacgtcggaacgaacgcttgcgtccggcgcgggacatttatatggcagtagtctgccggtgggtggcaagaatacacatgcggtgattaccggacatcggggtttggttgaagcctcaatgtttacgcgtttggatgaaatgcgggttggtgattacttctatatcgatgtgatgggccatacgcttggctatatggtggatcgtattgccgaaatcgaccctaacgacacatcacaattgaagattacctctggcgaggatcgggtcacgttgatgacatgcactccgtacggtgtgaacacgcatcgtctgttggtctcggcattacgttccgtcattcccgaagagattcccgcagaggatgatgcggcaaaagatgcgcgtgtgattgcgggcgtggtgtcagttgctacgttgctgggcggtttgttgttggtttggctgcgccgctgcccgtggcatgtccgtaggcatgccgcttggtggccaaagcgcaactagggactaatggcgttaatgttgcacttgacagatgcttctttgtcagggaaaactttgaaagagacatgacaacgtttgcttatagttttcattgcgatttacgggggtaagaatactctgaaatcgcgataatatgtacgatttcaaggaaaatatatccccttgattacctctttgggagggtgtatatctctccttttttctccttatggtttaggtaacgaagcgattgctggacggtatgtgaagcgaagatgcatcaaatataccggtcgaaggaggaaggtatttccccgatcgcttaacggtacaagggggtagacgtatgagacacgtctttgagcgaaacagggcgagggacacaggtctgttcacgcgtcgtgtcattgcgattgtcgcgacggtcgcaatgctcgccggcgtggggtgcgtcactgcttcgtcagcggcggcggaagatgtcacgggagccttggaacaacaaatcgagcagccggtattgcaggaatctgagcaagaagattcacagccggtggaacaaaattcgatggtgggagaagagcagccgtcagaacaagagcagccgtcagagcaagaggcttaccagcaagttgaacaagaaacggaagaagagactgggcagggggctgaacaacaagctgaacaatctgatgagcagccggttgcgttgtccactcaaccgattgtgcgagcgaatcgggcgcagccggtcgctcagaatgagactggttctcagttgttggaagagtcgtttaagaactctgatttcaccgattcagggaactggtcgatgagtgggagtgcctgcctaactgcgaagggttgctcgaacacccaggacagttccgatatccagaggcatgacggcaacggttacctgcagttgacggataacagcgaaagcaagagcggtgcggtgctgtataaccagcccgtcattagcaagaacggtctgcatgtgtcgttcgactattacatgtaccacaaaaccagcgcaggccaatgggacgagccggcggacggcatcagcttcttccttacggacggtgccgccacgctggagcagaccggcgcggcaggcgcaggcctgggctatgcgaccaatgatgaggacggtaccggcagcgcgaagcgtctcgagggcgtctcccaaggcgttcttggcatcggactggatcgattcggcaatttcagcatccagaacgcttccggaacgaaagaccgcgtcaccggtggcgatgattgcgggcagtggagcagtccgcaaggttccaattcggtcactgtgcgagggaaaggctccgtggacagtgatggcgagtggaccaagggatactgcattgtttcttcgaccaatgtggcaagcaaagtgacaaacggattggacacgggctatgcgaccaattccgcggatgatgccaatggcaagcgcgtcgatatcaccattgctccgctggcggatgtgaatgccgctacccagcatctgaccgtcaagataggcggtgtcattgtgcttgagaaggacatcgatcgcctgcccgattcggtgaaattcggtttcagcgcgtctaccggtgccgaccaccaagtgcagctgatccgtggtctgagcgtgtattcgatgacgaagctgagccagctcgatttggtgaagtcggtgaacaaggatacatatccggatgcggacacgcatgtgttcaaagtgggggattccgttccttacacattcgtcgtgcgcaacagcggcaacacccagctgaacaacatcacggtgaacgatccgaacatcacaaacgtcacctgtggcgcgcagactcttgcgccgggtgcccagactcagtgctccgggacgctgaccatcaccgagagcttggtgggtgagaatggcaccttcacgaacaccgccaccgccacggcgacggatgcggatggcaagtccgtgacttcgccgcaggcgcaggcgacgattcatgtgaacaagccgctgggcgctcccgagaagcataagcgcatcaaaaagaacaatgatggcagttacaccgtgaacgtggatgtgaagggcgctgccagcagcaccacggtcaccaccacccagccgatcgacttcacgctggtgttggacgtgtccggttcgatggatgacccgatgggctcaacggatgggaccaagcggttggacgcgttgaagacagctgtggacaacttccttgatggcgcggcgaatgccaataagggtgcgcaatccggttctgaaccggtccgtgtcgggttggtgaagttctctggtaaggaatcaaataacgtcgggaatgacatgtaccggagtggtggataccagtgcaactattcccagatcgtaagcaatctgactgcgggtatgagtggcctgaaaaccaaggtcaacgagcttaaagctgctggttccacccgggctgacaatggattcaaacgcgcggtcaaggtaatggaaaaagctcggaccgatgcgaagaaggtcgtcatcttcttcacggacggcacgcctacatcgcttagtgagtttgaagaagaagtggcagacaatgccgttaccgctgccaagaagttgaaggatggcggtgccacggtgtattccattggagtcttctccgatgctaatccgtcctcgatcaaaagcgccgaaaaccagttcatgcacgcggtgtccagcaactttccaaaggcgacagcgtacaacaatcgtggcgacggagatgaagacgccgggtattacaaggccgccaagaacgcgtcggaactgaacgccatcttcgatgagattcagaagagcgagaccaccacgtccgcgtacaccaatgtggtgatggaggatacgctttcggaatatgtcgaccttgccgacggcgactatacggtcgtggccaaggacgcgtccggacaggccgtcgctttgaccaaggatgtcgattacaccctgacatatgacaagaacgcgaagaagttcactgtcaggttcctgaaggctctggcccacaacgtgacgtacacattggcgtacaaggtgaagcccacgcaaaatgcatacgacgactacgcctctaatctgaataccggcgaggatggatatgccggcgtgaagggtgacgcggataccgatctggacgggaacaccacgtcctcggaccagcttggtttccattcgaacgtttccgcatgcctgtcatacacagccgatggcgtggattatgcatgcgacggcaatccatacccgcatccggtgattcaggtggtttcctcgacgttgcatatcgaaaagcagtggagcggagaaggtaacaagccgggaagcgtcacggtggatatcaagcaaggtggcaatagttacaagacggtcacgttggagccgaatgcgaatggaaagtggtccacggatgtgactattccggccggtgccgagaaaacatatacggtgacggaaaccgaacctgagaaccatcagtggaaggcctcctaccagcacaaagtcggtgacggcaagttcgccgatggcggcacagtgacggtgccggcgtccacggcatcgcagaacgccacagtagtcatcactaacacgttgaagacggccacgttgaagaacgcgattggcgtgaagaaggagctgtccggccgcgattggaaggattccgacgagttcatcttcaagctgaaggcagacgattccaatgcgccgatgccgttcgactgcaaggacaagctgtcctgtacggtgacggtgaaacacgattcgtctgacaatcacgttgcttacttcggcgacattacgtacgacgcaggtgaagccgagtacacatatcttgtgacggagaacgctggtaatgcttccgcaatgtattactcgcaggcggaataccgggtggtcgtgtccgtgatgaaagacgaaacgtccggtgaatggaaggccgttgtcaaatccgtgacccagctgaaaaccgattatggtgccgctggttcgaattgggacaagacccagccaatgctgttcaccaacaaatacatttcagcatcgtcactgccattgacgggccgcatgggtgcggaacgatggtggcaactggcagcgagcgggatcggcgtgctggcattgctagccgtcgttgcggccgaccagtggagacgtaagaagcggctcggctgaataacacaggatttgcggatcgcgggggcatgttgggttcccgcctcccgcgattgcagaacacagtaaccaacaattaggaagaggagattctcatgaagatgaggaagcttttcgcagggctggccgctgcggcaacgctgctgagcggcatggcgctgggcgtcgccagtgcgcaggctgatgatgcccctgcaactccgttgctacaagttaaccatgcgcaggaaggccatacgtacacaccgtacaagtttgccacgtttgagaatcctggcaatggctcggtcgaagtgaaaacggttgacgcatggaagggagctgtgaccaccgctgctgacgcagctgatgaaggcaataacggtattccggcagagtatagggataatccagccgcctatgtggcgacgttcactgcggatcagctccgtgtctttgccaagaccttggctgggattactccgccggcaggacctgatggtactggcctgaccgtaaccaaggatcaggcaaatacgagccaggcggtcaatgtggacggagaaggctggtatctggtgaaggatacgttcaccaaggctggcgaaacgactgcgacgttgggcacgccggctgtggtggccaccaccgtcagcggactgtccaatctgaagattacggccgatgcgaagaccggtcagggcaacatcacgactgaaggccagttcaacgcgaagaacgcgaatccgaccgacaagccgctcaagttcgcccggatgaatgacgtggacgtgaatggtaagagcgtaaaggtgggcgacaccgtggacttcactgtggccgcggacgttccttatgctgcggctggctgggatgtgtacccctttactattaccgataccgcgtccaaaggtttgcagattgcggcaacgagtgccttcaaggtccagttcggagatcatactactgtggatcccagcctgtacacgataacgcaggaaggcaatgctcaatccggcaccaccacgaccatccattttgacgatgccacaacgctggctgataggacgatcgtcgtgatgtatcagggcaccgttaccaaggatgcgctgaatggcttgaacggcagtgtggacaataaggctacgatcaccaccaaacatggcaccagcggtgaaggtaagactacccttaagacctacggtttcaagttcacgaagattggcaaggaagggaatgaggccaagcctctagccggcgccgagttcgttgtcaagaatgcggagggcaagttccttaagcaggctgagggcggtgcgtggtcgtttgtttccaatcagaatgatgccaagaagttcattactgggaatgatggtttggtggaggtcgcgggtcttgcggcaggaacctacacggttgtggagactcaggctccgaccggctacgcccagaacttcagggtcactttcaatgtggagatcacaggtgaaggtctcgtcactttcgtaccggatgcccttcatcaggtccagccgaacgataacaccactgcgaatgccaccgctaccgtgctgaatgtgaagaatgtcactcagctgccgctgaccggtgccgcgggaaccgtgttgttcaccgtcgtggcgctgctggtgggcggtgccggtgttgccgtggcggtcaagagccgtcgccgcatgtactgagcgcgtgttcgacgtgaatgagttgtgaattgactcacgcacaataaaagtcaatgcgggcggttgtggatgttccataatcgcccgcattgacgtgtgcccgaccggttgaagtaatatacggtcagcaatatttgaaaagctgcttgtgagaagtcggatatacacttgcttcattacggggtatagcaaagggggtaaaacgatgcgtggtggaggatcattcagcatggacgagctccaaatgttgcggaatctgccggcggtggccaacgtatcgaaagaccgcatcacgtactccaacgcgttcaaacaggtgtgtgtcatacggtatcttgcgggggaatcgccgaccaaaatcttccgcgaggcgggattgccgccggaactgattgggtataaacgtatagaacgaagtgtggcgcgttggaaggctgccgtcctcaaatccgtgaacggtagcagtaacatgagcaacggcgaaatcattacggagctcgtcaacctgtatgttcatgcggtgacgcgcaaggagaaactcgacgacatcgcaggaatcgtcaatcccgataaggcaaatattggaaatgctccgaattcgctggacggggcgagcgtgtcgggggggggggtatatatccgctgacgtgcccgtcccatccggtgcggcttccatcgccgtgccggatgcacctctcagtgcgggcaacggtcttgacagcgagacggcgcttgtcatcatcaagcaacaggcacgccgcatcgacgagctggaacgcgccaacgcttccttgctcgacaagctcaacaaggcgatcccatccccgaccgttgacaactaaaaccattcgtctgcttgattgacatgtgggagtttcgggcaggctaccccgcgatttgcataaaatgccccccatctggcatgtggcaaatatggtttgcgctatatgtggcagagtccccgcggaaaaaagaggttagagggtatgatttatcccctctaactaccttgcattcaagatggtctgccacatatagtgaaaattagttttggaaaagatgcgaatctgccacatataaggcatatgggtgtgtttcgcggtgcgaacaatggcggagattgtgcggctcccgcggtagggtgtgaacattatgacttttgggaatacgaaaaccgaaaaaaccggtacaagcacgtccgacgcgacggaaaccgcgcacatcaaatccgtcgaaagcctcgaccaaagcaacgaaatggagcgaggcctgaaaaaccgccacgtccagttcatcgccatcggaggcaccataggcaccggcctgttcctaggctccggtaagtcgatcgcactgaccggcccgagcatcattttcgtgtacatcggcgtcggcctgatcatgttcctgctgatgcgcgccatcggcgaaatgatgtacagcgaccccagccagcacacgttcatcaacttcatcacgcgctatctcggccgcgggtggggcaagttcgccggctggacgtattggatcgtgctcattctgaccggcatgaccgaaatcaccgccgtaagcacatatttcgtaacgttcttcggcacattcggcatagacctgaactcgtggaagtggttgatcgaactatgcttcctcgtagcgctcactggcatcaatctgattgcggtgaaagtgttcggcgaggcggaattctggttctccatgatcaagatcacgctgatcgtcggtctgatcgtcaccgccatcgtgatgctgatcatcggcttcagctaccccgccacgcacatcgaaggcgtggacggcacggtgtcgggcgccacggtgagcctcacgaacatcaccgacggcttccagctcgcgccgaacggctggatgaacttcttcatgagcttccaaatggtgttcttcgcctaccagctcatcgaattcgtgggcgtcacggtgtcggaaacgcagaatccgcgcgaggtgctgccgaaggccgtgaacgagctgatcatgcgtattctgattttctacgtgggcgcgctgatcgcgatcatggctattgtgccctggcgtaacttccacgagaattccgacggttcgttcggctcgccgttcatcatggtgttcaaatatgcgggtcttgattgggccgccgcactggtgttcttcgtggtgattacggctgccgcgtcggcattgaattcgctgatttattcggccggacgccacttgtatcagctcgcttcggattccgagtcgcctgcgatggcgcgtttggctgaggtttccgaccacaaggtgcctgcgaaggcgattgtcgtttcgggttgcatgattctgttctccccgatcatcaacgcgattccgggtatttccggcgcgttcgtgctattcgcttcggccgccagcgctgtggtgattttcatttacgtgctgacgatgctcgcccaccacaggtatcgtcagagcagcgattttctgccggacggtttcgtcatgcccgcttggcaggtgtttgattggattgcgatcgcgttctttgtgctcgtgtatgtcacgttgttcctgtcgacggacacgattggttctgcgattgccggtctgatttggctggttgcgtttggcggatattgcctgctacacgaacgattccagaatcgcgatcttaaggaagccttgcagcagtagcgtttgcaggtaacgcaggatacaagtaaggggcgtttgccgaacgtgagtgcatcacgtacgttcggcaaacgcccctttcagcatggtctttgcgcgaatccccattacgggatccagcgcaaatcagctgatgtagtcggcctcgttcgtcggactggacggcacggcatgatcttccgtaaccttgcccaagccagacaaatacgcttcacgacccgcttcgatcgccttcttgaaagcgcgtgccatcagcggaatattgccggcggaagcgatggccgtgtatgccatcaccgcgtccgcgcccatttccatggcttccgcagcctggctcggacgtccaataccagcgtcgatgatcaccggaacattggagttcttaatgatcacttcaatgaaatcgcgtgcacgcaggcccttattcgagccgatcatcgcgccgagaggcattacgcaagcagcgcccgcgtcttcaaggcgcttcgccgcaatcggatcggggaacatgtacggcatgaccacgaagccttcttttgccagctgtttcgtggctttgatggtttcctcattgtcgggcagcagatacttcgcctcatgttcgatttccaccttcacgaagtccgtctggcacacttcgcgggcgagacgtgcaatacgcaccgcttcctcggcattgcgtgcgccggacgtgttcggcagcatggtaatgcccttcggaatgtagtcgagcagattgttttcggtggtgcggcagcgacgcaacgccatggtgacgatctgcgtgcctgcgttctcaatggtcgccttgatgaggttcagatcgtagcggccggaaccgaggatgaagcggctcgtgaacttgtgtccgccgaggatcaacggatcggcgtcgccggtggcgatttcgtcatatgcgtgcgcatccggttccggcagcagtgcggtgttcgtggtggtgccgaccagctcgtcgagcgtggcgttcggtgctgccgcgaagtctttttccgcggtggtgatcgtgttttcggtgctcatgattaatccttactatgcgatcagtgtcgtgttattcgttgtaatttgcgattgtggttgcgtttgtgtttgtgtttcgctgtcaggcgtcttcttcgccaagaatcaagcgagtgatcatattggcttcatgacaggcgaccacgcccacacgcggtgccatcagaccagcgcccggcaccggagcggtttcgccgtcgccgcagaagtagaaattcttcgaaacgcgacgagtattcaccaaattggaactgcggaatcccgccattccagaggcgctcaccagcttcttgctcggcagattctcaagcacggcattcaccagcatcgtcttgttttccggcacgtcgaacgcttcgcaaataatgtcttcattgccgaacaacgtcggcacgttctcgtcggtcactttcacggtatcaatggtgatatcgataaaaggattgatctgacgcaagttactgcgcaatgcttccgtcttgtactgcccaagatccttcaaaaaatactgctgacgattcagattcgtcatatccacgcgatcaaaatcaatcaaatgcaggtgaccgacgccaatgcgggtcaacgccaccgcaatggtcgatccgaggccgccgcagccgcaaatggccacgtgcgccgcgtcgagcttgtcttgcgtggctgcggtatggcggtcgagcagggctgcgcggatttcttcgcggctgacgagcgtggtggggtcgggctggttgtcgaaagcgtgctggcgggcgtcgatctgcgcctgcgatgcggatggttcaaaagtcatggttgttctcgtattctcgttttccgttcatgcgttgtttttgccgggttggtcgtgttttgtatgttcttgcgattgttgcgcgtgtattgcgccggtcgtaatcgcaagaaactttgaaagtggttcagccgccctgcacgaacgtgacgatttccaacgtatcggtgcccttgagctgcgtctgcgcacgctgggtgcgaggcacgatttcgccgttgagctcgacagccacgcggtcggcgcgcaggcctttgctttcgatcagttcggccacggtgatcggcgtggcgatgttctcttccttaccgttgatgatcattgcggttcccttctgtgtctgtcgtgacacatgcttcctgcactccaaatgtccgtttctggtgaatcggacatccggaggttcatttttggtctttaaatgtccgattctgcagaatcggacacgcacggcatctatttcagtctacggatgtccgtttctggtgaatcggacacttagttgcttatttgagccgcttgtgcgtccgtttctgcagaatcggacactcaaggttggtacgaaaaaagggtcgccgaaggaaccgtaccctatgaggtggtgcgcccctccgtgaccctaatcacgcgatattcgattatcgcgaacggaagatgagatacgccctgcggcgtgaacaacccgtctccttacggcggcattacccgcatcaagtcctcggtcgaagctccgtgagctccctctcagcctttcggctcccgttcggttgtgccttcatcttcgcgcacgcgcccgacaagcttgcgccggttcacgttgggttagtcttgagatgaacgtgtacgaatcggctatgttcttggaaggaaggggaagatgatgatgaacggtgagttggcaggatttacgattcctcggcttggtatgggaacgatggctttggcgattgaggggcgtccggatcgcgataccgcgattcgtacgattcatgccggtttggacgcgggtgtccgctatttggacacggcttggtcatattatctgccgagcgagcccggcaccggtactgcggaagaccttggctacggcgaaaagttggtgtgtgatgcgctcgctttgtgggatggcccccgagatgaagtgctggtcgccacgaaaactggctatcgacgcaccatggaggtccccgcttttgttgctcctgtgtccgattctggagaatcggacaaacagggtgccggatttggggtacagatgtccgattcaccagaatcggacactcaggggcgggattctgagggatgcagccgtcggcctggcgaggaacgccagcatttgcaggcggcgggcagtcaatacgggtggatggcggattcgcgccccgaaaccatgattcgtgacgccaaggagtccgcgttgcacttgggcgtcgatacgctcgacctgttgtattcgcatggccccgatcccgcggtgccttacgaagaccaatgcggcgcgttgaagcagctgctcgacgaaggcgtgatcaaatatgcgggcatctcccgtgtgaataacgagcagatcgatcttgcgcgcggcattatcggcagcggcttggtcgccgtgcaaaaccagttctcgccgtcgcatcccgatccggaacatacgatggagcattgcgccgaattggggctcgctttcgtctgttggtcgccgctcggcggattcctcgatacgttcgatcagagcgcgtacgatccgttccgcacggttgccgcgcaacgtggttgctcctaccagcgtgtggtgctggcgtgggaattgacccgttacgaacgtctgttcaccattcccagcgctcgcaatccgcaggaaatcaacgattccttcgctgcaacgcaacttcagctcactcaagaagagcttgcgatgcttccttgctgattatcgtttcctttttgggcgttttcctgtacttgcacgttgcgatcgaaaaatgtttacagtaaaagatattatcgagacataactgatgggcatcgaataaggcgaggtgaagcgtgggcttcgagcgggagtcgtttgacaagctgatgaaagtggtctggggtaagaagtctcagatgcagcaggcgatgtcgcgtgattccaagggcgagccattcattattcgcgagcttgagttcaagggcgcgcaaacgccctcgcagttggctaccgcgttgaaggtcacgtcgggcaggatttccacgctgctggctgcgttggaaaaaaagggtctgatcgagcgtgaggtcgatcccaacgaccgacgcattgtgcatgtgaatcttaccgagcaggggcgggcgaaggccaagcagcagcgcgaggatatgcgcgacgccgtctgctgggtcttttcgcagatgggggagcgtcgcacgcgcgaattcgtggatcttaccgaggaatttgccacatacgtgaccatctgcatccctggccagccccgtcccaccgccgaagaagtaaagcaagccttcgcaaaagccgaatctgaagatcctgcgtagggactgcctaccacgtaagcgtgcgaccggcatgcgccgctcgcgactgtaagcttggccaaacggccttgagtgtgtcgcgaatggtatatgttggccgcgcgcgaccgagctgagaagaatcgctctcagcaaatacacagaaatatgagattgtcttacactgtaagtaattaaatatcgtaagacaattcaataggacttatgtaaatcattaatcgcaattcgatcaactcatgtagttgatccaaccaatccatcaatcgcaaaaacttcaaacgcaacacaagagaagggatccaagcatgttccgcattatgcgatacctctccaaagcggagataggccagatgctcattgcactggtcagcatcgtcgggcagatctggcttgacctgaccctgccggactacatgtccgacatcaccaccctcgtggaaacccccggcagtgaaatgcacgatatttggatcgccggcggcaaaatgctgcttatttcgcttggatcggcagcatgcgccatcatcaccggctatttcgcggcacgcatcggcgcatcgttcagccagcgtctgcgttccatggaattccgcaaggtagaatcgttcggaccggctgaaatgagccgattctccacagcctcgctgattacgcgttccacgaacgatattacgcagattcagatgttcatcaccatgggattgatgatgattgtcaaatcgccgattatggcggtttgggccgtctgcaagattgcgggagacggtctcgaatggacgctcgccaccggcatcgcggtagtggtgctgctggtctccatcacgatcctcatggttctcgtcatgccgaagttcaagtccatgcagcgactgaccgataacatcaaccttgtggcgcgcgagaacctcaccggcctgcgcgtggtgcgcgcctacaatgccgaggattaccaggaagccaagttcaccaaggccaacaaggaactcaccgacacccagctgttcaccaaccgtgccatggccttcatgatgccgttgatgaacaccatcatgaacggtcttatgcttgccgtgtactggatcggcgcctacctgatcgacgcggccgacgcggccgacaagctcaccaccttctccaacatggtggtgttctccagctactccgtgcaggtgatcatgagcttcctgctgatgagcatggtgttcgtgctgtggccgcgagcggacgtgtccgcacagcgcgtgctcgaagtgctcgacaccgaaccgctgatcaccgacggcacccgcagcgatgctggcgaagcaggcaagcagggcgaaatcgaattccgcaatgtttccttcacctacccggattcgcgtgaagccatgctcgaaggcatcaacttcactgccaagaagggcgaaacggtcgcgttcatcggctccaccggctccggcaaatcctcgctcatcaacctcgtgccgcgtttctatgacgcgacgcaaggcgaggtgctcgtcgacggcgtgaacgtgcgcgactacacgctcaaggcattacgagacaaaatcggatatgtgccgcaacaatccttcctgttcaaaggcacgatcgcatccaatgtcagctatggcgacaatccgctcgacaccaccgatgccggcatcgtcgacatgaccgatacttcgaccgcggccggcagaaagcgcgaaaaagagctgatcgcaacgcaaaacgagcatcgcacactcacttcggaacagcgcgccgacgtgcgcaacgcatgtgaagttgcacaggcgaccgaattcatcgcaaccaaggaaaagcagtacgattccgcgatttcgcagggtggatcgaacgtgtcgggcgggcagaaacagcgtctgtcgattgcacgtgccgtctatcgtcatccggaaatcctgattttcgacgattccttttccgcacttgatttcaaaaccgaccgtgccgtacgcgacgcgctcgccaaggaagcgaaagattctaccaaactgattgtcgcgcagcgcatcggcaccattatggacgccgaccgcatcgtggtgctcgacgacggcaaggtggtcggccaaggcacgcatagcgaactgctggaaaactgcgatgtgtaccgtcagattgcgcagtctcagctgagcgaagacgaattgaacgacggcaagtcgggcgaaagcaagctgccgggcgaaaccggcaaaccgattgaaaccggcaagccgtccgtcgaaagcgaattgaacgaaagcgagggtcgctgatatgccaggaggacctatgggacgcggccgcggggccgttgaaaaaccgcaggatttcggtggtgtgatgaagaaactggtgcatttctgccgccactacattcccgccatcattgtggcgctcgtattgggcgcgatcggcacggtatgccagatcgtcggtccggacaaactcaaggacatgaccaacgagatcgccaaaggcctgcctgcgctagtcaatggcaagccggtgctcggtgcgatcgacatggacgcggtcacgcacatcgcatggctgctggtggcgctgtatgtggggtacgcggtgctgtgctacgtgcaaagctggatgatggcgaacgtcacgcagcgcaccgcacaggagctgcgcgaagccatcagcgtgaagatcaacaagctgccgctcaagtatttcgacaaggtcagctacggcgatgtgctcagccgcatcaccaacgatgtggacgccatcggccagacgctcggccagtcggtcggctcgctgatcacgtcggtcacgctgttcgtgggcgcgctcatcatgatgttctacaacaatgtgattatgacggtgtgcgccatcgcttccagcctggttggcctgctcatcatgggcgcaatcatgaaggtttcgcagaagtacttctcccgtcagcagatcgcattgggcgatgtcaacggtcacgtcgaagagatgtacgccggccacaccgtggtcaaggcgtattgcggcgaggctgattcgattcgcgcgttcgaaaagtacaacggcgatttgtacgattcgggatggaagagccagttcctttccggcctgatgatgccgttgatgaatttcgtcggcaatttcggctacgtggttgtgtgcgtggttggcgctgtgcttgcgatggatggcaagatcgagtttggtgtgatcgttgcgttcatgatgtacattcgactgttcacccagccgctttcccagttcgcgcaggcattccagaacctgcagcgttgcgcggccgcttccgagcgcgtgttcagcttccttgaagagccggagatggccgacgaatccgacaagcaggcgctgctcggcgtgaacggcaaaccggtgcgcggtgacgttgagttcagtcatgtgaagttcggttacgatccgagcaagacgatcatcaacgatttctccgcttcggtgaagtccggtcagaaggttgcgattgttggtccgaccggtgccggcaagaccacgatggtgaatctgctgatgcgtttctatgagatttcgggcggttcgattgcgattgatggtgtggatacgaagtccgtgccacgctggaacgtgcatgaccagttctccatggtattgcaggatacgtgggtgttccgtggaacagtgcgtgaaaacatcgcgtattcgaagccggacgtcaccgacaagcagatcgaggacgcatgcaaggccgtggggctgcaccactacatcatgtcgctgccgaatggctatgacacagtgcttgacgacaaggccacgctttcgcagggtcagaagcagttgctcaccattgcgcgagccatggttgaggatgcgccgattctgattctcgacgaggccacctcttcggtcgatacgcgtacggaagagctgattcagaaggccatggacgcgctgaccgtggaccgtacgtcgttcgtgatcgcgcaccgtctgtccaccatccgcgatgcggacatgattttggtcatgaaccatggcgacatcgtggaaagcggtacgcatgaggagctgctcgccaaaggcggtttctacgccgacatctacaacagccagttcgccctcaccgactgattcgccgttctggctggctgattcacaggagccgcacgtccccaaagacgtgcggtctttgtttatttcggctggtattcggctgttatgcggatcgcaggaagagatcggccgggaagttgcggctgactgcgatttggcgggattcgtccaatgttgcgtatgtgaaatcgaacgtgcgttgcagttgtgctacgtcggaaacgaacagggccgtggccaggccgtccgcaacggcggtggggtagtcgcgtgcaagattgagcgttgcgtttgctggaacgtatgcccagctggcttcggtttgttgcgcgggcagtccgtcgatggcattgagcagatgatgaatggcgatttgggtgcgctcgttgactgccacgttccaatggcgtcggctgggtgcgcttgcgcacaacgctccgttcgcaatatgtgcgattccgattgcgtgggactgatcttccggatcctcaagtgcgacggaaatgggctgttccgcatgaatcagcaaatcacctcccgcatcaatcacgaattgtgacgactgcagcatgcgcccgagcagatcgacgagatagcctttgccgcaggcgccgaaatccaactgcaccggctcatgcgttaccaatgtggttccgtggcgggtcacatcgcgtccccaaacggcgcgtccgcgcaatgcgcccaaatgctcgggcgcatcttgcgtaaccgtgaaactcagcgacgcatcgtatccaagtcgaatcaaatcctcgccgacgcacggatcaatcgcgccggaagtggcggaaaatagcgcatcatacagatcgaacagcggcgcgcaccaatccggaaaatcgaaacttccgccatgctcggccttgccgatcgccgcaatcagcgaatcattgcggaatcgagacagcacgtgttcgtaatcctcaatgagcgattccattgcggaacgcaccttgtcgtcgatcggcgaatccacggaaatcaccataccggtgccgagcgccctataaaacgccgtgacaaacggcatgcgttgcgtcaaagaatccatgcctccgatgctacccgcccatttcctccagctgctgggggaaatgggattttcgcgatggggcgcatggtacagttgccggcagggcgtcaacatggaggttgatatggggaacgtcgagaatgcaagtgcagccatgcgcacaacaaaaacggtgaagagcctgccgatgcccaaagtctgggctttcgccgtcggccaattcggctgggcgctactttccggcattatttcgaattggctcgtctacttctaccagcctgacagcgaaaccatctcgcaagggcaaaccgtgttcgtaccgcaaggtcttgccgtactcggcgtggtgaccgtagtcggcggcatcaccgcgttcgcccgcttcttcgacgcattcgtggatccggccgtggcaagtctttccgaccgttgcacatcaaaatccggtcgtcgcatgccgttcctcaaatttgcggcccttccgctcgccctcgtcaccgtgctggtgttttggagtccaatcaacgatacgagctggatcaacggcgcgttcctgttcgccacggtgatcggctactacattgcgctcacgttctactgcacgccctacaacgcgctgatcgccgagcttggtcacgattccaaacagcagctcaccatctccaccgccatttcgttcacgtgggtggccggcaccgccattgcatacgtggcaccggtgatttgggctggtttcgtgccgggcttggggcgtgtgaacgccattcgtttgacgttcaccatcatggcggccatcgcattcgtgtgcatgctggttccgccgctcaccatcaaggaacgcgattacgtcaactcgcagcccacgtccgaatcgaccatcgaatcgttgaagcagacgttcggcgacggcgaattccgcaagttcgtctgctccgacgtggtctattgggttgcgatcactacattccagactggtttgccgttcttcgtgacaagcctgctcaaacttcccgagaccacgaccaccatctatttcgtgctcatgaccgcagtgtcggtgctgttctacatgccggtgaatgtattggcgaatcgtgttggcaagaagcggattctgctggtcgctttcgtgattttcacatgtgcgttcgcgtttgcgggcgcgcttggctccggtctgctcgctgcgattccgccgatggcgcagggcttgattctctcgattgtcggcgcgattccgatggccgcgttcggcattcttccgcaggcgattgttgcgaatattgccgacgcgagctcgaaaacgaccggtcaggatcgtcagggcatgttctatgcggctcgcacgtttgcgatgaagatgggtcagtcggtggcgatgctgctgtttaccggcgtgagcacgattggcatggcgtcgggcgccggctatcgcattgcggctgtttgcgccgcggtattgtgcggcatcggcggtgtggtgttcgcgttctacaacgaacgcaaggtgcttgacgtgctcgaatcctgattccgtccatgcgcccgctggcctcacgattttgtttttcgttgctttttcggaatcgtgaggtcaccagggcggaatcgtgaggtcagaaagtccagctccatcccaaatcccccaattcccgaatcttccaatcgcacgaatatgcatggagaggaacggcgaaagcgcctcaaaaaatcactatgtgagacgactcgcgcggattacagaaaagaagaatggcggaattccgccattttaaaggtttctacaacaaaactgccaaaaaatcaagactgttctttcgatttttttcgttttatcttgtgaagtcggtgcgcactgtgtgtatggcaaaggtggcgcactcgtgaatcggattgtgaacggctgagagaggaagcggtcttatgtcatcctgcgatacgcagcgggctacaagtgtgtccggtcgccttgtcgcgttcattgcggcattgatgatcgcgttgaccacgcttttcgcgactaccgcagttccgcagccggcaattgccgccgatgacggtcaaacgaattttgattcctggactgccgctgcgaagaacatcgaagaccagcttgcgactgccgaaaaagactacaatgacggcaattacggtcaggccggcaccgatttccagaccgcgcattggatcggttacgacgcatccaacttctcgaaagtcgtcaacgacaccatcagtgccgacaagcagaaggaactgctgcagcaattcaccgatcttgaaggtcttgcctaccagcaggaccaaggcgacgccatcgcagccaaaatcgacgcgctgaccgccgaaatcaacgcaaccgcgcaaacgcttgacgcgaacgccgacctcgccaatcctaaggaatatgcgaagcagcgtgccgcgcaaaccgcggaagagcgcaagaagctcgacgcggccaagaagaattcatccaaaggcaaaggcgaccgcacgtggagtgaggttgccagcgaaatgaccgtcattctcgaccaggcatacgaggctgccgctgccggcaagggcgacgaaggtgccacgctggtcaacaacgcctactaccagtactacgagaagctcggcttcgaaaagaacgtgatgaacgtgatttccggcgatcgtgtttcgcaggtcgaataccagttcaagatgactcgtaagatcatgcgcgacggcggttccgacaaggaaatcaagcagcatgtcgacgatttgaaaagctggctcgtggaagacgcggccaccctggacggtggcgcgtccggcaatgtcaacggcttcaccaagctcgtcaccagctccgccggccaggcgttcctcattctgatccgtgagggcctcgaagcgctgctggtggtggctgcggtgatcgcctacctggtgaagtccggcaacaagcgtttcgccaagtggatctatcttggcgtggtcgcaggtctggccggttccggtttggtcgccgtactcttcacgttcctgttcggcggttccggcccggttcaggagatttccgaaggcgtgtgcgcgctgatcgccactctcatgctgctgtggaccagtaactggatgctcaacaagagctccgtggaagcgtggaacaactacatcaggaacaagaccgaagcggctgtggccggcgcgcaaagcaaggtcgaatccggccagggcctgggcttgggcatgatcgcctcgcttgccatgctgagcttcctcgccgtattccgtgagggcgccgaaacggtgatcttctacgagtccatctactccatgagccaggatgcgcacggcatgtgggttggcggtctggccgccgccgcggtgctgatcgttatcttcctgattctgcgattcacttcggtgaagattccgatcggcccgttcttcctcgtcacttcgattgtgatggccgcattggttgtgattttcgcgggtggcggcatccatgcgctcatcgagggtgatcttattgaaggcacctacttgagcagcgtgccaactaacgattggatcggcttgtatccgtacgtcgaaacgattacggcgcaggtgattgccgcgatcgcggtggttgtgctgttcgtggtcggtttcatcaagaaacacaggatgaagttggccgcgcaggcggaacaggctaagtaagcgccaatcaataatcacaagtaaagatttagagatttccataagtttccaacgttcctcaaggaaccaaagaaaaggaagagaacacaatgaagaataagaagatcgccgccctgctcggcatcctgttggcaggctccatggccttctccctgtccgcatgcggcaattccaacgattccgcatccgatgccaagtccgacacctccacttcggacaccaccgacaaatccagcgattccagcgctgatgacagcaacggcgccggcttcgaagagattcaggtcgacgagaagcactccgatcaggatgttgacgctctgaccgtcaacgccgtgtacttccagccgatcgatatggaaccgtccggtatgggcctgaaggctgccgacgcttccttccacctggaagccgacatccatgccaacgagaagggcaccgagctcggctatggcaagggcgacttcgtgccggacctcaccgtgaactacgagatcatcaacaacgcgaacaacgagaccgttggttccggtaccttcatgcagatgaacgcttccgacggcccgcactacggcgccaacgtcaagctcgacgaggctggctcctacaagctcgtgctgaagatcgaatctccggagaagaagggttggatgctgcatgttgatccggaaaccggcgttaagggccgcttctggaccgagccgctcgaggtcactttcccggagtggaactacaccccgcaggagtggtgatctgaaacgtgagttccgacacatgccaagcgaaacggtttggatgtaagcctgaattcatgttgagattcaactcgtggttaacgccgttcacgtatcgcgaaacgtatgcaagtagcgcgaatatgggtacggcgttcgcggttgcctggatagtcgttcgacgcactcaaggccgtttggccgagcctatggtcgaacaaccatccaagcaaccgctctcttgcgtttgaggggatacgcttttgggagataacgcgcttttgggggaatcttggtaagggggttccttttgcgtgccgaattcactaggctttgacagggatatataacgaaaggtgtgagatgctgacgcagtacgtcacggtgttgcagggaacgctggcaccggctttgctgattatggcgctgaacgtgatgctcacggtcggtgaggggcgtgacaagccgtcgagcgcgtactggcgtcttgcgggcttcattattggattcgcgggtgccattgtgttcgccgcgttgcgtgcatccgcgatgatcaatcagcgtacgttcgtcaattaccccacgttgtggtgttgtgtgattttcgatatcgcagtgttcgttgttgtgctgttcgcacgtcgcatcactacgaattggcatgatcatcgcgcgttgctcgatattgcgaatgcgattggcgctcttgcgattgcctccaccaccttccgtgcgttgcctgatgttattttgcgtttgacgattttcgtggagccaggagatccgatcttcacttcggatatgctgcttcgtgcgcttggtttcgcattgggtgcggccactgcgattgttgcagcgttgattttccgtacgatgcgttccactgcgattcgttggtcgttcaccacggccgtgctgctgctgattgcgctgctgtttgtctcgcatttcactgatcttgcgcagattctgcagtccaagcgcatcgttcatttccctacggaagcgttcctggcgttggtgtggtgcatcaatcatcagcgtcatatggtcattgccatggtgttggtgttcatcattccggtggtcgccagcattgtgatgggcttcaaaatcaagccggaaggcgcaaacgaggccattgtgcgatcgcatatcgcgttccgtcgccgtgcgaaggcggccggcgcatggagtcttgttgcgatgatcggcatcacgttcgcgctcacgtatggtgtggcgcaaacgaagaaggtcattacgctgtctccgcctgaggattattcgctgagcgacggcgtggccaccatcaaattcagtcagatcaacgacggtcacctgcatcgcttccaatacaaggcgaaagatggcacggtaatgcgtttcatcatcatcaaaaagaatggtggagcgtacggtgtcggtcttgacgcatgcgataactgcggtgacgcgggctattacgagaaggatggcaagatcatctgcaagaagtgcgatgtcgccatcaacctcgccactatcggattcaagggcggctgcaatcctgtgccgttcgattatcaggttgaatccggcaaaatcgtaattcaaacttcgacgctcgacgcattgtcgacgcatttccagtgagcggaaagaggtagtcatgttcttttttcgaatgattttccgctcgttcagcaggcagttcaaacgcagactgctgattgcggtcaccgtgtgcctgtcggccacggtcagcgtggccatgctgggtgtggtgttcgacgttggagacaagctgaacgcggaactgtcgacgtacggttccaacatcaccgtgcagcccaaggccgatgccgtcgtcaacgacctgtacaacatggggggtgacgcgaatagcaacgcttccggcacttccgaatccgatccgaccacatttctgaaggaatcggacgcaccgaagatcaaaaccatcttctgggcgttcaacatcacgaattttgcccccgaacttaatatccatgctgacgtgaactgcgcgtccgaatcggtggattccagctcctgcaaggcttccggcgtgccgatcgtgggcacatggttcgccaagaccctgcatatggattccggtgaatccacggtggcgggcatgaacggcatgcgttcgtggtggaagcttgacggctcctggccgaaggacgatagcgcgcaaggcctgatcggcaccacgctcgcatccaaactcggcgtgaccaagggagataccgtaaccctctacaaaaccaccgccgacggcagccgcaacaagcagcggatcaccatcaccggcatttacgattccggcgatagcgacaacaatgcgatgtacattccgtcatccaccgcgcaggtgcttgcgaatctgcctgattccatcgacaagatcgaagtcaaggctctgaccacgccagacaatgatttggcgcgtaaggcgtcgaagaatccgaatgcgctcacgcaagatgagtgggaaacatggtattgcaccgcgtacccttcgtccatcgcctatcagatcgaagaggtcattcccggttccgtagccaagcaggtgcgtcaggtggccgcattacagggcgatgtgctgcagaaaacgcaggcggtgatggtgctgatgaccgtgctttcgctggttgcggccgctatcgcggtggcgaatctgatggccgcctcgattggtgagcgcggttcagaattggcgttgctgaaggcgattggtgccaccgatggtgcggtttctcgcctgatgctcgctgagacggctgtgatttcgttggttggtgcgattgtcggtgcgctgttgggttccggtgttgcgcagattgtgggacatgtggtattcggttccggcattacgatgcgtccgatggtgtttgtgctggtgtttgtgctgctgacgcttaccgtgctgatcgcctcgttctcgtcgatccgttcgattctgggactcaaacctgcggaggtgttgcatggccgctgatgtcaacttgagttccgtaaactcggccgcggctgcggcctcggtcacgaacggcacactgtgctgttcgtctgcggaggtgttgcatggtaggtgagttcaagacagtccgtaaggggcatgagatgactaatcgcaagatgttcttcaccatgctgtggggcgcggtgttccgccgtcgttcgcgggccgttatggccgtgatcgcctccatggtgggcgctgccacgctgttctgccttgcggcgacgtgtattgccgttccacagcagatgaacgaggaaatgcgtgcgtatggcgcgaatcttatcgtcacgccgtccgaatcagccgaaaagtcccacggcatcgacaccgataccgtcaaagcgttgaaccagatggtgaaaggctcgtacagcgcccgttccgccgcttaccggtatgaaagcgtgcgcatcaattctgcgccatacacgctggctggcatcacaaccaaagacgtgaaggcgctcaaccatcattggaacgtgactggcgattggcccagcaaaggcaacgtgatgctcggccgtgacgtggcagacgcgctcggtgtctccatcggttcgaccgtaaccatcggctaccgcgcatccgacgatgcgcaggattccggcgctcttagccaaaccgaagcgcaagtcacggaaaacggccgcgtttcgtccgacattatggagaacaccggcactgaattccgtgtcggaggcatcgtcgatacgggcggcagcgaagacgaaatcgtctacgcggtcaacgctgacgtggccaaactggccggtttcaaacgcggagcggacgtgatcgaatattccgtcaatgcggtaggcagcgaactcaacgatgtcgtcaaatcgatcaatgcgaatccgtcaaccggcgtgaaagcgcagaccgtcaccaaaatcacctcatccgacactcgtatcatcgccatgctgcaaaccctgttctggatcgtgtcgctggtcgtgctcgtgctgacgtttgtgggcgtgggcaccaccatcagttccatcgtgtctcagcgacgcaacgaaatcggcttgcgcaaggcgttaggcgcatcctcgcgcgccatcggcatcgaattctatgtggaatccgccatctacggactgattggcggcctgatcggcactgccatcggctacctgctggcccgcgtgctgtgcgtatccgtattcgaacgtgccattggcttcaactggctgttgggcgtcgcttcgctgctgttgagcgtgctcatcgccgtcatcgcatccatcccgccggttcgccgcgcaacccgtatcgaccccgccatcgttttgagggaggaataatcatgagttccgaacatacgttgaatacgttgcttgaattggatcatatttccaagatttacggcgatttgcgtgccgtcgacgatttgactttgaccgttccgcaaggtgaatggcttgcgattgtcggttcgtcgggttccggcaaaaccacgctgatgaacatgattggctgcatggacacgccttcaaagggttccgtcatgctggaaggccgcaagttggaggatttgaacgccaagcagcttgccgacgtgcgcaagaacatgatcggattggtgttccagaagttctatctggtaccgcatctgacggctgtggaaaacgtgatggtggcacagtactaccattccgtagtcaacgagcagcaggcgttggaagcattggagcgcgtcggtctgaaggagcgtgcccaccatctgcccggacagctttccggcggcgaacagcagcgtgtgtgcatcgcacgtgcgctcatcaactgtccgaaactgattcttgcggacgaaccgaccggcaatttggatgagaagaacgagaaaatcgtgcttgacctgttccgtcagctgcacgagcagggcactaccatcatcgttgtgacccatgatgcgctcgtcgcatcctgcgcccagcgcgagatcatgctcaaccatggcgtgctcgtcggcgagaagtggaatgatgaggccgcacggaaggtctatgagcaggcgggcggcaagccggcatacaccggttccactacggaaggcgcacagaacggcgagacggccatcagcttcgccgatccgaccaaagccgcgaaaaccggcggtgaggaataagctgaaatcagccgaataatccaagccatagcactgacgaatcgtacggagcgaacatgagcaacgaatcatcgaatgcgatcaaagtgatcgcactgtctgcggcaagccttgcgctgctgtcggcatgcggcgaacccacggcgacaccgatggacgatgaatatgccggaaattccggcgaaagcgtgcaatcgcaggaagaaaattcgaagaacagcggtagcgccaccgactccggcgattctgcggatacggacgtcaaaaaccatgccgacgatccgaacagcactacatccgacaagcaagacaccggcaactacgccgacggtacctactcgatcaacggccagtacgggccggtgggcgaagacaccatcgacgtgcatgtgacggtcaaagatcagaccgtcaccaatgtggaggttatcgggcatccgttcacgtccatctccaaaaagcaccagaatgcgttcgccgaagccatcaacggcgtggtggacggcaagccgctcaaagacctcaaggtagacaaggtggccggtgccagctggacgtcggaagcgttcaacaaggcgttggacgtggcccgtcaggaagcgtcgatccagtaggtccagtagcggcgaaaagtctgcaaacgtacaatgagcgccccggctacagcctcactcaaagagtgattaaaggccgtagcggggacgctcatgagtttcagatacttctacgtgcaactctgctctgcaatgcctttcagacggccataacgggccatagaacagccgtcatgttctcaggccaaggaatactcgcgtcgccatgcaacgccttacaggcgagcatggagccgagtatcgtgctgaacaggaattgcggatccaatccattacggaacattccggccctcacaccgcgatcgacaaactcagaaaaacgcttctccgcgggaacgagcacctgatccgcaatcgcattcaacgaaggattatcggaagaaagcaccacaccgacggctttcaaaccaagctcactgtcgaaaaaacagccctgaatgcgttgcagtatcgtcagcagaccgtttttcgacaactcgacatcgctgaaatccggcaatcccgcaacttccaactgaacgcggcgcaacagatcgtccgcattcttatagcgacggtaaatcgtggttttcgcaacaccggaacgacgggcgacctcttcaatggtcaccgcaccgacaccatcggaaatcacaatcgcaagcgtggccttcatgatcttatgatcggtttgctcgcgaagctgctcgcgccggctctgcgccttgcgaacggcctcatgcacgtcactgaccgcgtcggaaaccacatcggaaacggcttcggaaaccgcctcatgcactccggtaatcatgcgaccaccttggtgctttccaccttcgccacataccacctattgaatttgaccagcggaatacgcagcagcaagccaatcagcagcagcggaatcaggaacagcaacagcgaaccgatcgcatgccaataatcattgttgtaaataccggcaatggccgcacgcaatgccgtaatcgcatgcgtggccggcaggaacgggctgatatcgccgatgatcttcggcagcacggcaagcggatacgcgccgttcgcgccggaaatctgcaacaccagcgtcagcacgccaatggccttgcccacgttgccgaagctcgccaccatcgtgtaggtgaagaacgagaacacgagggaggccacccagccggtcaacatgaacagccacgggtgcactgcctgaatgtgcaggaacagcaggccgccgcccagcgagaacgtgctctgcaacagtgcgatcacggcgaacacgccataatggccgaggaacagctgatgcggcttcggattgtcgagctcctcacgattcttgcgcgacaccgtggtcttgagtgttacggccataagcagcgatcccacgaacaacggcagaatcgtgtagaacggagccagttgcgagccgaaattctccacagggaacacggccgtgcgcttcacctggacgggggccgcaagagccgccgccagcgaatcggtgttgttgccgagcacgtctttgacggtgtccatattgccgctgttcagcgcgtcggaaagcgtgccgttgaacgaggccagcgcggtgcccgctttgttcaggctttcggcggtggaatccaacaccgtgcgaatattggtcagctgcttgtcggccgacttcgtggtgctgttgagatctcccaacgcgcccttcagatcggtggccgtgctgctcagtgcggtggccgtgctgctgatcgaatcggaaatgtcgttgagctgcggcttgagctggctgtcgaaatcggttttgatgccgtcgatggaggccttcgcctgctgggcaagctggctcacgcgctcgcggtcggctgtggtgtcgctcactttcgcgtcgatattgtcggcgctggtgttgagtgagttcgctagatcgttgagttgcgtaatggtcgcgcccacgttggttttgagatgattgatggcgattttcgcgacttccggcaccagattgttgttgctgagctcgtcgagggcatcgtagatgttctgatagccttgcgcctgcttggatacgttcgcagcctgattgcgcagggcggtggccgtattgccggcttgggtgcccgcattgttgaatacgctgtcaatatcggtggagacagcgccgaagctgttcgacgagctgctcaacgcggtgctgagcgcattcgtgctggttttgacggctccggtcagatcgttgatgccgttcttcgactgtttgagctcgttgacggcgttcttcgcgctgccgctcacgttggaaagcaggctgttggagctgtcgagcaggttctgcgcgctcaacgtcagcgagctgaacgtggtcaacgcggatgacgtgtcgttcagcgtgttcgcgaagttgttcatattgttgctgaagttggtgagcgtggcctgcgatttcggtttgtcaagctcatcggccagctgcgaggcgatgttgagcgcggtgctcgtcaacgttgcggagaacatttcgttgatctgtgctgccacggtgtcggctccctggccggtgatcttcggagcgagtgcgttcttcttctcgttgttgtagtaggtgagtgtggcatggtcgccgtccgcggtgaagaatgtcatcatgcgggtgctgaaatccttcggaatcaccactgctgcatagtatttgccggatttggtgccgtcgatggcctcttttttggtggtgaaggtccagtccatctggtcgttggcgcgcaaggtgttgaccacctgatcgccgatactgatcttcacgggaatgagatcggacttgtagccttcatcgtcgttggcgacggcgaatttcagattgccggtgttggcgaatggatcccagcttgcgctcacgttgaaccaggagaacaggccaggaattaccaccagtccgatgacgatgatgatggagacgatgttgctggtcaggcgtcgaacgtcgccgacgaacagtttccagatgtttttcatgcgttgctcctttcgctgttaccgttgggattggtgttgctcgctgtgccggtgttgccggtcgcgttcatggcctgtaccagtgttgcgatgccgtcggcatcggcttggctggtgtctgcgacgttggcgatcgcctgtttggtttcgtgctttcttcgttgtgccttgcgcatcagcttgtctcgcctgatttgttgcgcacgcttcttgcggcgcagccttgcagcttggcgttccaccagttgttcgcgaatcgcttcgtcgctgaggctgccgagttccacctggcgttgcaggctgaaacgcatatattcgatgaccatcaggaatccgatgatgagcagcacccagatgatccaggtggcaagcaccacgatcttctcgccgttggtgaaggagaagatcagcaccagaatcaccggcacaatgaaaccggcaaccagcgcgccacgcttgagcttcggatacagttcggcgaagcggctcgcacgttcctcgatcgcctcacggtagccgcccttatcggcgagcacttgaatggcctgggacacgttgtagccgcgttccggaagctgtacctcctcgccgatgatcatgtcgctttccttgatctgacgggcgaacaggcggttgagattgaccagcagcgggcgaatcgcaagtccgatgaagaacgcggccacggcgaacatcagcagcgcgccaatcgacttgagccaatgcccgtcgtagaagccggcaatcgtctcacggaacgcgtcaatcgaataactgaatggtacgaacgggtagaccatgcggaagaatttcggcatcatctcaatcggatacaggccggaagcgcccggaatctgcacgatgatcagcgcgacgcacagtcccttgccaatatgcatgaacgaggtcgacagcgcgaaggtgatgctcagatataccagtgacgtgatgacgccggtaagtatgtacagcggcgcgttcaccgtctgcacgccgatgatgaggttgccgatggtggtgatcgcgccttggatggcgcccatgatgccgagcagcatgtagcgggcgaaatatttttcggaagtggtcaagtcgaggtcttcgaggccttcatcgtcgacctccaccttgaagatcactacgaaggcgaacgcgcccacccacagggccaggttggtcatgagcggagccatgccggaaccgtaggagttcatcggatacacgtttttcgtgtcgatcaccgtgggggactgcatgaacgaggcgattttctccgtgttgagggagctgtcgccggtcaggcttttcagcatgtcaacgctgccgagcgctttcaggtcggtgctgacggtgatgagcttgttctccacctgctcgagctgcttgtcggtgttctgcagcgtggtgcgggtgtcgttcgccacctggtcgagttggtcgagcacggcggaggtctggttgaccacggtggtctggctggttacggtgccggacagtgtgccggcggtcatggcgagcgagctcagaccggagttgagctgggggagcgcaccggaattcaacgtgttgcgggcatctcccatgcttttcagcgaattttgcgtgctggtgttgaagtcggtggcgagtttggacacgctgtcggacgtggattgtgtgttctcgctcaacgttttgaggtcgttgagcgtgccagcggccgtgttgttggtgtcttcgagcttcttgatgatgtcttggtactgtgcgttgtcgctgacgttcttgagcttctcgatgagctgggcgttgctgtcggtcacgctttgcatgttgctgacggcctgctgtgcggtgccgcttgcggacgagacggccgtggtcaccttgttgatgctggtggtggtgtcgctggcggcctgcgaaatcaggccggaaccgttctccaaagcggtgttggcgttggacgtgaaggtattgaggccgttttgtgcggtgccgatggcggtggcggtgttcgccagtcccttgcccgcacttgctgcggccagctgcacgtcgttcattgcctgacgggcggattgcgtttgttgcggcacgttggcgagctgtgcgtcaagatcttcgatggtggagcggatgaggcttacgttcttctgggttttgtcgagttctgctgtggtttcgttgacgaaggagttggttttgccgttgatggtgtcattcgcggagttcacggctttagtgagtacttcgctgacggtggagacgaaggtgttgttgacggtacggtcgacggtggtcgcgccttgatcggtgattttcggggagatcgggctcgatttttcgttgacatagtattccagcgtcggccggttcttgctgtcggtcacgacgttggcgagatcctcgctgaaatcggaggggatgatgatcgccgcatagcagtcgccggactgtaccgcttccatcgcttcggccttgcccatgaattcccagccaagctggtcgttgtctttcagcgtgtcttcgatctggtcgccgaggttcattttgccgagcagggcgttgtcggtgcctttgtcgacgttggctacggcaactttgatgccttgggtattgccatacggattccagaatccgtagatgttgaaccatgcgtacagcggcggaatgatggttatgccgatcatgatgacccaagcggcaggtacggtgacgagtcgtttgaggtcacgacgcagaatctgcagtacgttgcgcattgtctccccagtccaatggatgttcgaccgtgttggcacgtagcgatacgttattcgtagcgctacgcctcccgtatcgtaatacccgctctcggacaaatttgggcacaggcgtaaatgcgctccgtccatgactgaaataaacacgacaaaccgcggcaggactgtgaatcttgctgttggagaccgcgcaacttgccttctgtgtctgcgcaagtcgagtctgctgtctgcacatcttgtgattgcgggatgacatgtgacttgcgcaggcagaaatcgcaggttgtgcgcgttgcgcgcaaacaatcatctcgtgtagcgcactgcgatcgggttttggtagcgttgtgcagggaaggacgaacaagcatgagcaagattgaagatgtgagcgaagccatcgccgacgaaaccgaaatcgcagcaatcgaagaggccggcatcattgcgcaatcgcaatcggcggaagatgacggcaatcctgctgaccgcaggctgccgctgattgcacgtatttacggcatcgtcatgttgatcgaaggcgtggtgacgttgccgatcatcgtgatttcctgcctgtatgcagtccacgccgcgctttccggcaaactggcgtttggcgcgctgaatctcaccactattctgtcggttattcatgctgtggtgctgctggtctccaccgcatgccttgcgattttcggcatgctgctgattctcaacaagcgtcggcatatcgcgcaatggacgtatctgatgattccgctcacgcttgcggaaggcctattgtcgttgtcgttgcagggtttgggcgtgaatctgatcagtccgaccgtgcagctgcttgtattggttgcgttgcatatcacggctgatccgtcgctgcgcgaggagcgacgtttgcagttcgcgcttcgtcgtttggatgcgcgcagcgagtatgagacggctgtttcgaagggtatggccggtcgtgatctgaccggcaagggctatatttcgcttgatttcttcaacctgttttggctgtttgtggtcggatgcgtgttcggtttggtagtggagacgctataccactatgtgctgttcggcgaatggcaggatcgcgccggatttttgtgggggccgttctcgccgatctacggctttggcgcggtgatcctgacggtattgctcaaccacttgtggcggtcgaattggatgctgatcttctgcgccagcgcggtgattggcggcgcgttcgaatatttcaccagctggttcatggaggttgcgttcggtattcgcgcgtgggattacacgggtcaatggctgtcgattgatgggcgcacatccggcaaatacatgtttttctggggaatactcggcttggtgtgggtgaagctgattctgccgcatttgcttgcgatgattcagcgtattccgtggaagattcgctatacgttgacggcggtgtgtttcgcgctgattttcgttgacggcgtgatgacgttgatggcgctggattcctggtattcgcgtatggcgggtattgcgcaggattcgcccgtttcgcaattcttcgccacgtatttcgacgacgacttcatggccaatcggttccagaccatgacgctcgacccgtccacggccagccgcatgtagtgtctgactgttttatgggctagatggcgaagctttgtgaaagaacgtgtatggtgcgtccgctattggttgcgccgtgcgcggctgcatgtgacctgtgcccgcactgcctttgtggactcggtgccctgcgacttctacgcgcttaggcggcgaagctttgcgcgagctggcggatgagatccggcctatgtccactccatgaggagttcggtgagatgacgaccggaatctgcttgaagccagcgtttttgatctgttcgaaggtggatgggttcttcgtcagatcaacggtgtcgtaacgcacgcccagctttgcgagctcttgttcggtggcttcgcattgcgggttgctcggattggtgaagacggtcacggtcattcgatttcctccctatgcaaaaatggcttccgtcgtttgcgaaagccgtgtcggccacgttcttcggttatgctcgcttacgcaagccactatctagcatacacactacaggtagtggtgtgtcgtgagtttcctcactgtatatagtggggaattccccagaattccccaaaatacgaacgtttgttcgaatatgtctagtgtaccccaaaccacggaattcacgtccgcgcgcatgtcgtgcgtgttttatggagagggttgtatataggggggtggcttggtgacgtcaatgcctgcctggtggcacggcgaaaactgtttattcatatgtaaaacaccggtaatataccgcaaatgacctcagttgtcacccccccccctaaaatgataagtatgcgtagcgcgaatttgcgtgggcgtgttgaacaaccttgatgattccgatttgcctactgtcttaaggactgttgggttgacaggaaattctgagggggctgtgagcatattcgcgggaattggctctacggtatgctgaggttcggcggttttccgctgaatacaggaaacccctggaaatcgtacgattcccaggggtggatggttggtcgctggctagggcagcgcatcagggtgaagaagtgttttcgaaggctcttcctcacctatcaactgcgtttgaggtatagccctcgccggcagccagccaagtcttatcttatacacccttagctatgtcggcgaccttattgcagggtgtgttcaataaagccataacgtgccattaaatacggcaatttggctccgcgcaagtactccagaggaagtcgttgcacggagccaaattaatcgctttcaggcgaatgccaccttgactgagttagactcaggcgcgcttgcggagcacggtgatgccggcgaagccgagcagggcgatcacggcgaacaccgcaacgccaccaacggtagcgccggtgttgccgagaacggccttcttgatcttctgggcaacggtcttcttggtgttgcccttggtgtcattcttcttggtggtgtcggccggcttgctgtcatccttcttggagtcgtcggtcggagcgtccttgtacatggcgtacacggcccagttgccggtcacgaccatgtctggatcgaccggaacgtcgccgtcgttggaggcgaagccccagccggtgaagatcttgccctcgacggccggtgcctggatgcccagcgcgtactgggagaacttgaccttgtccttggcgtagtagccgacggtctggatgagcttgtcggtgcctgcgtagaaggagaccacgttctgggtggtgtcatcctcggtcggagcgtccttgtacatggcgtacactgcccagttgccggtcacttctgcgtccgggtcgactgcgacgtcgccgtcgttggaggcgaagccccagccggtgaagatcttgccctcgacggccggtgcctggatgcctgcggcgtaggtggagaacttgacgtggtccttggcgtagtagccgacggtctggatgagcttgtcggtgcctgcgtagaaggagaccacgttctgggtggtgtcatccttcttttcagcgttcttgtacatcgggtagacggcccagttgccggtcacgaccgtgttcgggtcgactgcgacgtcgccgtcgttggaggcgaagccccagccggtgaaggtcttgccctcgacggccggtgcctggatgcctgcggcgtaggtggagaacttgaccttgtccttggcgtagtagctgacggtctggatcagctcgttcttggtgttgtagaaggagaccgtgttcagagtcttatcttccgaagtcggagtgtccttgtacatcgggtagacggcccagttgccggtcacttctgcgtccgggttgactgcgacgttgccgtcgttggaggcgaagccccagccggtgaaggtcttgccttcgacggccggtgcctggatgccgagtgcgtactgggagaactttgccttgtccttggcgtagtagctgacggtctggatgagctggtcggcgcctgcgtagaaggagacggtgtactgggtgttgtcatcctgtgtcggggtatccgcgtacgtcgcgtatacggcgatgtccgcgaacacctgatcggtgtccttgagcatggtgccctcggagtaagcccagccggtgaaggtcttgccctcgatggtcggtgcctggatgccgagtgcgtactgggagaaggcggtgcctttctgccaggtgactccctggatgctgtgtccgtcagcggtgtagaacgtcaccgtggcgtattcttctttagcctgcgaggaagttgcagaattctgattctgggcagtatcagccattgctactgccggtgccaaggcggccagagtcgctacagctgcaacgcccgcaataatctttttgccaaaagacatttggggaaaccctttcttagttacgtaactagttgccccaaagcgatgccttcgaaataccgccctgaatgcgtggagttccccctcataagaattccgaaggaccatgatagctgccccctagcgactttttaagagtctagggcgtgttcgttggaattgcaatcttttctcgatttcccactttcctattgccgctgtattggcggaagccttttggaatcggcaaggcgccatcccggcaaggcgtcttgcctgtaagggtgaggaatccgatgatggcgacggcagggtgtttaccggcgcggatgatgatgtgacaatccgtgtttggggcgcgaacaatgtgagtgcgactaattgcgtctggagccaaaaatcgcgggaattgaaaacccttggaagctaatgtttccaagggtttcgcggtgccccccgtgggattcgaacccacaacccacgacttaaaaggacgctgctctaaccgttgagctagaggggcaacagagagacagtatacagcatatttacgcaaaacgccacacaaatcagttgtaagtaacgaaaaacgtggattatcaccaagtcattgccgaatcatcatcgaattcccgcgaatcgcaatatcatttctgcatatctgctcgtacagtggaacgcatgtcatgtaccacgattcttgtaggcaagaaagccagctacgacggctccaccatcatcgcacgcgacgatgattccggttccggccgttacgaccccaagaaattcattgcggtcgcaccgcaagaccaaccgcggcattaccgcagtgtgctcagtcatgtcgaaatcgaccttcccgacaatccatgccgatacagcattgtgccgaacgtgctgccgaaccgcggaattctcgcggaagcgggcgtcaacgagcgcaatgtggcgatgagcgccactgaaaccatcgcagtcaacgagcgcgtgctagccgctgatccactcgttgaactgcaaccggcgaacgaagccgctgatacccctgaaattccgggcggaatcggagaggaagacatcatcacccttgtgctgccttacgtaaccacggcgcgcgaaggcgtcgcacgtctcgccgaactgcttgaaacatacggcacctacgaatcgaacggcatcatcatttccgacgtaaacgaaatctggtacgtcgaaacgatcggcgggcaccattggatcgcccgccgcgtgccggacgactgctatgcgaccatccccaaccagctcggcatcgacgatttcgacttcgacgacgccttcagcacccaacgcgagttcatgtgcagtgccgatctgcgcgaattcatggacgcgcaccaccttgaccgcactatgagcgcgggtgcgagtagcggcttcggattccagccgacgagcgttttcggaaacgccagcatgaacggcggtggcaatagcagtagcggcgcggcgctgggtcacaaccatttcaatccgcgcacggctttcggcaccgccaccaccaaagaccgcatctacaacacgccacgtgcctggtatatgcagcgccacctcaatccaagcgaggactgggattcgccggccgcccgctacacgcccgcatccgacgatattccgtggtgtcgtgtgcctgagaacgctgtgacgctcgaagacgtcgacttcctgatgagtgcacacttcgaggggaccccttacgatccgtacggtacgctcgggacgccggaaagccgccatcgctaccgtccgatcggcatcaaccgcaccgggcatatggtggccatgcagattcgtccgtacgcgccggaggcaagccgttcgatcatgtggatctcatacggttccggccccttcaccgcggccacgccgttctatgcgaacgtcgacgatacgcccgcctacctgcgtgacaccacgccggaagtctcgaccggcaacctgtactgggcgaaccgtttgatcgccgcgctcgccgacgcgcatttctacgaaaccagcaatgcgatcgaaggatttgcggaatcggcctgcgcttacggccatcgtctggtggaacgtactgatgccgaattgcgtgagatgtccgcgcaaacgagcgcgtccgaatcgcaagagcgtgcaggggccgcggagattgcggaaaacgcaagtattgcaattatcgcaaaactgcagcagtccaacgaagaaatggcggaatatttgcgcactcacgttacgaaactgctcaacgacgtgctctacacgtccagcaatctcatgcacaacagtttcgccatgtccgaccgctggaactaagcataaagccccgaaattcggcaaaacccgtcccaatgggccaagtttccgcgctcggagcattccgcatgaacgcaggctgttggaagcgtcagtgctgctcccaacagcctcacggctgcatccgcatcctcgtacgtcagtttttgcccatatctcgcttatatatggcagatttcaagagctgacacgaggcatttcgtttatatatatatatggcactcgtgcttgtaggcaaggcgatttcgggggtaaaatatactctctaagtcaccttgctatcaagggcatctgccatatataaggcagatagtgctatctagaccgtcgatcgaccatcaaatcgtcggaaatcgcgatcagttgaacccgacgacgtgttccgccacgaaataccccttgcgaatcacgaaacgaccgatcgacccgcgcaaattcaacgcacgagacatggccttcttgcgcacatccttgtaaatagtgggggagtacgccttaatgtcgtcccacatatcctttttcttctcataattttccggatcgcgagacaaaatcatgaacacacttgccacggaactttcaatcgccaggaagtggatcatataacggtacaggccgtccggcaccgtgccgcgttccggagttgcacgcaccatgcactggttgacgaggcgcagctggtcgacgcggcggatcatcacgtcggtctgcacgctctggccgtcgcgaccgatgaaatagtggtagaacggcgtatccaaatacttcatggtcttcacccacgggaatggctgatacgcgtaaatgaagtccacgtagaacgtgtgctccggcagctgcatgccggactctcgcaccacggcggtgcggtacgtcagcgcgtgcatgagaatgtattcagccaagccgaaatgcccaagatcgttccaggtcaggcgctcgccggccttcatggcatggcggaagttcaccacatgcttgttgcgtttgccaaccttgtcatacacataattagtgacgagcatgtcgatcggctcggtggaatcggcctcttcacgcagcacggccatgacctgttcgagcgattcggggccaacccaatcgtcggcgtcaacaaccttcacgtacatgccgcttgccgccgcgatgccggtgttgacggctccgccatgccccttgttctcttggtggatggcgcgcacgatgcctggatagcgggcttcgaatttctgtgccatttccagcgtgccgtcggacgagccgtcatccacgatcagcacttcgatgtcgtcgttgcgcttcgctgcgattaacgacatgacgcatcgttccaaatattcggtcatgttgtacgcgggcaccacgaaggtgagcgtcttcttctcctgcatagtcttccttggtaggacgaggtgacctgccgcgcgcggcgcgtggtcactgcgtaacgaaactaacgtagcaccttgtttgcttcaggggaacggtttgtacgcaataggcaccctgaatagcgcaatctgcacctgaaatttcccttaagggtaccgttgttgacaatttgtaagttttcgtcgatgcttgttggcttgtgcgatgcttgcgattcccctgttgctggtactgttcgattcctgcgtctggcgcctgctggcgtgggctgcgatgcttgcgatgactgggggcggctgggttttacgactgctgttcggcttgcgtgccttggcttccggctgcgtcttgttcggtattctgttcagcgttctgctcggctgggctttccgtattgttttgtgattgtgcctcttttgcggccttgcgctcgcgtttcgcgatttccttgatttcgcgcctttcctgcttttccgcctcttttgtggctttgtcgctttcgaaacgcagttccggcttggcttccatgcggctcaagccatgccaggccagattcacgatgtgcgcggcaatctgctctttactgagtttgcgctggtccgcccaatactggcaggtatatacggtcatgccgatgagcatctgcgcgtagtatggcacgcccttggccggcagatgctggcgtttgaacgcttcggcgagaatgtcttccacgcgcagggcgatgtctcccaaaagcgaattgaacgagctggccggatcggttttcggcgaatcgcgggtgagcacgcggaatccttcagcattctcctcaacataggtgagcagtgccagcgccgtgcgttccacgatttgacgggggtgcgcttgtgggtcggagagcgcgttgacgagcgtgtcggtaagcgcgcgcatctcacggtccaccaccacagcgtacaggccctctttgcctccgaaatgctcgtacacaatgggtttcgacactttcgcggtggcggcgatctcctccacgctcactgcttcgaaccccttcgacgcgaacagcgaacgaccgatttcgatgagctgctcgcgccgctgatacgacgtcattctggatgtattggccatgccgtccagtttttcatgccccgtggatagtctgtccgattctggtgaatcggacaactgtggtgcgtatggcgttgtctacttgtccgtttctcccgaatcggtcatctgaacgtcggattcggatggtttgttgtccgattctggtgaatcggacattcgtggtgcgtccgcggggcggagccggtgtgtccgttgcgctttttaggctggagtcatggatacgaatgtgattattgcgattgtcgccgttgtcgttatcgcggcaattctggtgattggcggttggtggctcggtaagacccgcaagaacgccgtcgataagtccacggaggatgcgaaagccaaggctgacgcccgtcttgccgcggaagcaaagtcggctgcggctgattcttccacggtgaagccgtccgttgattccaatgttgatgcagctgaaaaagctccggctgaaagtcagcagaagtcctcagctcaagcttcctcttccgaaacggcagctcctgcaccagccaccgaagccaagcccgaaccggttcatgaaacccccgaatccgccggcacgcgcatgcagcgtcttaaggcgcgcctgtcgaaatccggcaatccgttcggcaaggctctgttcaacattcttgcgaaggatcagctttccgaagccgactgggaagacgtcgaagacacccttctgcttgccgatgttggcgcggaagccagcgaacagctcgtcgaggaactgcgcaacgacgcccgaatcgcaggccagtccgatccggccgaagtgcgtgccgcgctgaaggacaagctgttgaagctcgtaggcactgacacggatcgccgcctcaatgccaataaggagggtgccaacaaaccaagcgtcatcatcatggtcggcgtgaacggcacgggcaaaaccaccactgcgggcaagctttcccgcctgcttgtttccgaaggcaagcaggtcatgttgggcgctgccgataccttccgcgcggcggccgccgaccagttggaaacttggggtgccaaggtcggcgtcccggtcgtgcgttccgacaaggacggcgccgatccggcgtccgtcgcattcgaggccagtgccaaggccaaggaagagaacgccgacgtgctcatcatcgacactgcgggccgcctgcagaacaaggcgaacctcatggacgagctcggcaagatccgccgcgttaccgaaaagaaccttccggtcgacgaggtgctgctcgtgctcgacgccaccaccggccagaatggcatgacccaggccaaggtgttcgccgaagccatcggcattaccggtgtggtgctctccaagctcgacggctccgcaaagggtggcattgtgatttccgtgcagaaggagcttggcgtgcccgtcaagcttgtcggcctcggtgaaggcccggacgatctcgccccgttcgatccggaaggcttcgtcgacggcatcctcgcctgagctgattgcgctcccgagaaagcctccccgcgtgggaggctttctttttacccccgaccagtcctatttcgcctatatatggcagatttgccggttcgtccgctggtttctcgcttatatatggcagatgcttttggagaaagtcgacttagaaggtatatgtttacccccgaaagcaccttttttgcgagtgagagtgccatatatgggcgaaatgtctcgtgtcagtcctccaaatctgccatacataaggtagatacgctgaaaaatgggctgatagtggtttggcctgagagcggtgcgcaatctgaaacaaaacgtgccagccgctttattccgccgttttcggttgacgtaatggcgagatggcgttaccttgctgtaacacgtcgtaacgttttcaaaacgcgggcggcgttccataccgttttgtcagccccatacgatggggccggaaatgtgaactcaaaatgaaagaaagaggagggtgacatgggtcagcttgattctggaaatgccgcgtggattttgacgtccgcgtcccttgtgttcctcatgacgccgggtgtggcgttcttctacggtggcatggtccgcgcaaaggccgtgctgaacatgatgattatggaggcggccgctctgtccgtcacaatggtgatctgggtgctgtggggctggtccatcgcctacgcaggcacttcggtcggcggtgtcttcggtgatccggccacaggcttcctgctgaaggattccatggtttccgacggcggtgtcttcacgtcggcctcgctgaactccaacaactacccggtcagcgtcgatgtggcgttccagtccgcattcgccatgattaccgtcgctctgatttgcggcgctatcgctgaacgtgtcaagtactccacgtggatgattttcgtcgcgctgtggattaccttcgattacgctccgctcgcccacatggtgtggaatggcggtctgctgagcgctgacggcgcgatctcccaggctatcggcgctgccgcccacgatttcgcaggtggtacggtcgtgcacatcaatgctgcagtcgccgctctggtgatcgtgttgatcatcggcaagcgcaagggcttcggcacccagccgttccgtccgcacaatgttccgttcgtgatgcttggcgctttcctgctgtggttcggatggttcggcttcaacgctggttccgcgtttgccgccaatggcaccgcaggctacgcttgggtttccacttccgctgcaaccgccgccgcaatgctctcttggggcttcactgagaagatccgcaccggccactacaccgccatgggtgccgcttccggcatcgtcgcaggtctggttgccatcactccggccgccgatgtggtttccccgctgtgggccatcgtgctcggtgccatcgccggcgtgctcacctgcctcgcttgcggcctgaagttcaagctcggctacgatgattctctcgacgttgtcggcgtccacggcgtcggcggcttcaccggcactgtgcttatcggcttcttcggcgaaggtaccggtctgttcgcgggcggcgactggaagcagctggttgtgcagctcatcgttgccctcgttgccatcatctggtccgctgttgtcaccggcatcatcgccttcgctctggagaagacgattggctggcgtgtcaccgaagctcaggaagtcggcggtatcgatcttgccgatcagggcgaacgtgcttacgattttgctggtaccgccagctctgttctcaaggaggtgaagtgagatgaagctcattaccgctatcattcagccgcataagcttgacgatgtcaaggaagccctcgctgccgcaggtgttcacggtctgaccgtgtctgaggctaacggttacggccgccagcgtggccacaccgaggtttaccgtggcgccgaatacaccgtggatctcattccgaagattcgcgtcgaggtgctgtccgatgacgccgatgccgagactctggtcggtgtgatcgtcaagtccgccggctccggcaccatcggcgacggcaaggtctgggttgccccgcttgattcggtgacccgcgtgcgtaccggcgagaccggctctgccgctatctgataattcattcggatagatattaagggccccgggcttgggttcgggttatcaatagacagatccccgtacgtgcttcgcgccgtgcggggattttcatacgattttcgcgtcatattttttgcttcgtatttccccgctttcgctttatctgctcagatttgcttgcttttgcgaagattcataaggatttgctatgacttcagcggttgatggtcttaaacaacgtttcatggatataagtcagccggatgccgacggcgtgtaccgcaatggtgcggcgaaacgtaaggctcgtacggatctggccatggattgcctcaaacaattgtggcaggaggcttgccagacggtgtcttttgacgttccgcagtccggcattggtcttggcgcggtgggttcgttggcccgcggccaagtgggaccgagttccgatcttgacttggtggtcatttatgagcctcacgcgctcactgaccggcagctcaatgagcttgccaacaaattgtggtatccgatttgggattcgggtcttgatcttgaccagtcggtgcgtacccgcgcgcagtgcgaggcggtcaccgaccatgatctgcccgccgcgatgggttggctggacgtggtgccgatcgcgggcgacacgcagctgatcgagtccacggctatctccattttagagcgttggcgtagggccgcccgtaagcgcttgcccgaattgttgggttccgccaagtctcgtttgggcgagttcggccgtatggcgtatagcaatcagcctgatattaaggagtctcgcggtggtttgcgcgattccgtgctggtctccgcgcttgccgcttcttggcttgccgaccgcccgcacggccagtatgacgatgccgtcgaacggttgctggatgtgcgcgattgcattcatttggtggccaataaagacacgaatatgttgctcgctccttatcaggcgaaggtttcggcgatgctgggtttggctgatccgacgttgccgagcggcgagcgtgaggcgaagtcgattgatgatttgcagacgttgcttgcgcgtgttggtcgccagatcgcgttttcgcttgattccacggcttctcgcgctgagcattcgttgactcatgagaagcctcgttttgcgtttttccaggtgttccagcctcgtggcggcggtaagcgtcaggcgcctacgtttgatgtggtcgcgcccggtatcgccaagcatgaggaggagatcgtgcttgcgccgggtgccgatccgaagtccgatccgtgccttgcgttgcgggctgctgttgctgcggctgagtttggtctgccgatcgcgcccggcacgttgcagaatctgaagtcgtgtccgatcgatgatcgcacgtggaatgatgagtcgcgtagtctgttcttgcgtttgcttgcgagcggtcccgcgttgttgcaggtgtgggaggagattgattttgtcgatattccgggtcggctgattccggaatggctggcgattcgtaatcgcccgagtgcttcggctgcgcatcggtatacgattgaccgtcattcggttgaggtggtcacgcggcttggtcgtgaaacacctcgtggaaatcgatatgatgatcggcattatcaggcgttgctgttggctggtattttgcatgatgtcggtaagcgtccgggggttgccgatcatgcggcggagggtgcgcgtcatgcgtccatggtgttgaagcgcatgggttttgaccgtgacattatttggtgggtcacgttgttggtgcgtgagcatcttacgttgtcggagtttgcgactggtcagaatccgaatgatcctaatgttggtgacgagttggcgtctcgtcttgatcatgatccgctgctgcttgacatgctgttcgatctgactcgtgctgacggttcgtcgttgggtgccacggccggcgagaccatttccaaacaatacggctggagtaaatggcgcgaaacccttgtccgaaccatgtacaacgccacccgctaccacatgtgaggccgcgtaggctgtgagcgaatgcccggcaaagcgacatggctgccgatgcggtacctgccgcgtcggcggaaacccatcgtttaagaaaaagtggggaacatatcaccttcggttcacttaagcaagtcacaaccgggggaatgggcacccgtacgaaagatgtccccaagttgtccacttggttatccccatttggtggataactcgatatgttttccacatagttatccccagtatgtggataactcgggttttttcggctttcttatccacagcgaaccgattcgcgcgtgtcgggtgattccgatcctgccaatgcggagattcctccagaatctcatcgcaacatcattcgtgaagtggcacaggtattatggtttttcccggtacaccacacatcgaagagctggagaagcatggcggagagcaattcttggaacaatggcctgaatcaagggcaaaaccgcggtttttcaggcaatggcagcatttccggcgcgtcgggaacggctattcgcgacgccatcttcgaccgtgtgccgccacatgacgacgccgccgaaatggcggtgctcggcggcatgctcatgagcaaagacgccatcggcgaagtctcgcagatgattgacatcaccgacttctaccagccgcgcaaccaaaccgtgtacgaagccatcatcaacctgttctccgcatcgcagcccgtcgacgcggtgctggtggccaaccagctgctcaaagacggcgacctcgaaaaagtggggggatccgactatctgcacagcctcgtcgcatccgtgccgaccgcagccaacgcaaccttctatgccgacatcatccaccagcgtgccatcctgcgcaatgtgatcgcagccggcaccaaaatcgcacagctcggctacaccgccgaaggatcccaagccgaagacgtcgtcaacctggcacaggccgaagtctacgaaatgtcgaccggcaaagtgaggcaggattacgcgccgatcggcaccgtcatcaccgacaccctcgaccaaatcgaccgactgcaaaacggcgaggtttccaaaggcgtgccaaccggattccgtgacatcgacgacgtgacgcaaggcctgcagccgggccagatgatcgtcgttgcaggccgaccggccatgggtaagtccacgcttggcgttgatttcgcgcgagctgcggcgctgcaccacaatatgacgtccgtgatcttcagcttggaaatgagcaaaaccgaacttgcgcaacgaatcatttcggcggaagcgaatattccgctgtcagccatgcgccgagcggaagaaatcacgcaggaacgttggaatatcctcaataatctgcaggataaactgcagaacgcaccattattcatcgacgatagtccgaacatgagtttgatggagatccgtgcgaaatgccgccgattgaagcagacgaacgatctgaaattagtggtgatcgattacctgcagctcatgacttccggcaaggccgtggaaagccgccagcaggaagtgtctgatttctcgcgtgcattgaagctgcttgccaaggaattggaagtgccggtggtggcgctgagccagctgaaccgtggccccgaaatgcgtcaggataaaaagccgcagctttcggatttgcgcgaatccggttctatcgaacaggacgccgacgtggtgttcctcgtgcacaggccggacgcctacgacaaggaagatcgcccgggcgaggccgatatcatcatggcgaagcatcgtaacggtccgacgcagacgttcaatctcgcgttccttggcgcatactccaagttcaaagatatgccgcaggactaccagagccaacaggaggtatagcatggcgtggaactcattcgcaacgccgttgatcggcaaggccgtgcgtgcggcctcccgcctggcacatggcggcggcagcgcgttccccggcaaaatcgtggaacggatcgacccgcaattcctcgcacgcaccctgcagcagctaccgctcggcgtggtgctcgtatccggcacgaacggcaaaaccaccaccacgcgcatggtggcaagcatgctggaatcgttgggattgaaggtattcaccaatccgaccggatcgaatttcacccgcggcgtggtctcgtcgctgctggccgaagtctcgctcggcggcaaactggacgccgacatcgccgtactggaactcgacgaagcgtacgcggtgcatttcgtcaaacaagtgcaacccgactactgcctgctgctcaacgtgatgcgcgaccagctcgaccgtttcggcgaaatcgacaataccgcacgactgctgagcaaagccgccgaagcgaccaccggaaccgtagtgctcaatcgtgaggatccacgcatcgcacgacttgctgacgtcgcacatactgaagatggtgtggaagtgcgctatttcggtcttgacgggtcgttgcgcagcttcttcccgtccgacgacgacatgcgcacgacagtcgatactgcatcgtccgcaaatattgagattgacgatgctgcagtgattgcgaaaactggggaaaatgcagaaaaatcggaagatgcggcaattgcggaacagctaccagctgacgtgaccttgcttgccgtgggcgaccatcgtgccagtttcggcatcgacggtgaaacgtacgaaaccggtgtgagactggaaggcgtgtacaacctgtacaacgcggcggccgcgctggccgtcgtgcgagcggtcgtagccgatgcgcaagcaatgttcctgccgttcgagcagaacgtaaccgacgaactattgcgacaagtgggaatctcacagcgcatgatcgacttcgcgcattccaccacgcaagccatgatcgacgcggcagccgaagtcactccggcgttcggacgcggcgaggtcatcgacgtgaacggctcgccggtggagctgctgctcgtcaaaaaccccatgggattccgtctgtcgctcgcatccttcacccctgaaggctgcgacaccatgatcgccatcaacgacgaatacgccgacgggcgtgacatgagctggctgtgggacgtggacttctcctcgctgcgagacaccggtgtggccatggtttcgggcgtgcgtgcctgggacatggcgttgcgcctcgaatacgatcaggtgccggtgaatagcgtcaacacggaacttgaagaggccgtctcaacgttcgtgaacgcgaatccgggcacccccaagcacatttactgcacatacacggcaatgctcaaaacgcgagccgcgctcggcaaaatcgccgaagtcgccgacgctggcgtgggcaaataacagcgcgaatccgcgcaacgcatgaaaacgcatgaagaacgtatgaaccgcatgagggagacgatatgagccaggtaatcgacatcgtgttgctatatccgaaagacatgaacatttacggcgactccggcaacgtgctcaccatccagcgccgtctcgccctatacggctacgagccgcgcgtgcacgcctacaatcagggcgacgcgtggcccgaacacgtcgacatgattctgggcggcggcggccaagacaccggccagaagaaaatcatcgacgacttcttcaaacgcgccgacctgctgcgatcgctggccgccggcggcacccccatgctcatgatttgcggtctgtaccagctgttcggcgaatatttcgaaacggtggatggctcccgactcgacggcatcggcgtgatcggcgcgtacacggtcgggcaggaagtgcgcatgatcggcaatctgaccgagcattccgccgatttcggtgacatcatcggctacgaaaaccattccggccaaaccttcctgcgcgaaggcgtgcagccgctcggcaccgtcgacgcggatagcaccggcaataatggcgaggatcatacggaaggcgcccgcgtcaacaatgtgatcggcacatacatgcacggctcgctgctgccgaaaaaccccgcgatcgccgattttctgatccgcaccgccgcagaacgccggtatggttcgttcgatccggccgctgcagggcagacggaagcgcagcgtgcggaacttgatcgcatcaacacgattgccagcaatgcgcgtcgcgtggccatgtcacgcccgcgctgattgttttcgcgctgtttcgtagttttcgcgttttcgtacgctgtgagcatacggcagcgagtcttccgcagaattgtaacgattgactagtttcgttgacgttatttgtgaagaaaatgcgatagagtgggtaccaccatcacctaaggaggtaatcatggctgattttgattttggtgacggcctgcgtaaggtcttcctcgccggcgttggcgctttggcgaccacggttgagaagagccaggaaatcgttgatgatctcgtcaagaagggcgagctgaccgtcgaacagggcaaggccctcaacgccgaactcaagcacaaggtcgcggaggccaaggaatcctctgaagccaaggctgcagaggaaaccaaggaagccgaacctgaagccaaagccgagtaacgttcaatcgttcacatcgccgtctgctcgtcgcatcacgttcagacggcgatttgttatgcggaacttgcgaaacatgcgaacggccgtgtgcggaacgtaagaaacgtgcgaaacatgcgaatcgcatgaaatacgcgggacgcaagtctcctcatgaatcccactcatcgtaatccgaccaacgtttgcgagcagcgatatgtctttgaattctccgatcgagccggatgcggcccgacccgaaagcgtggagccggtcacactttccgaccgagtcaacgcggtgatcaatccgacggcgaacccctcgtccgacgcggctgcggcaacggcagccaaatccgcgggaaaaacgggaatcccgcaatcgcaaggcaagcagaacgacgcaacctttacgcaatccgaaaccatcggactgttcggcccgcgtaaagactcattctcgcagcgctaccacctgactcgtcgaggcaaactgaagcgacttgcgcaaatcgcgcaaatcgtcaaccaattcgacattgtgcacggcctgacccccgtcaaaatgcggctcatgttcgaagcgcttggcccaactttcgtgaaagtcggacagatcctgtccatgcgctccgaaatcctgccccaatcgttctgcgacgaactcgccaaactgcgcgccgacgccgaccccatgccgtacggcaccgtcctgcaagtgctggaagacgaatacggacgcccggcaggcgaaatcttcgaccatatcgacgccacaccgctcggatcggcaagcctcgcgcaagtgcatcgtgcgaaactcactaccggagaagatgtggccgtcaaagtgcaacgcccgggcgtgcgcgaaaccatggcacaggatgtgtccatcatgcgcaccatcgcacgaatagccgccaaaaccatgcccagcgcccaagtggtcgatctctccggcgtggtcgaagaactgtgggacaccttcgaagccgaaaccgacttcatgatcgaagcgcgaaatctggcggaattcaaacgattctgcgaacactacaaatacatggactgcccgaagccatactccgacctgtgcaccgaacacgtggtggtcatggactacgtcgaaggcatttccgtctcgcatcctgatgagctcatcgaagcgggctacgatctgaaggaaatcggcaccaaactggtcgacaattacgccacgcaagtgcttgacgaaggcttcttccacgcggatccgcacccgggcaacatcatggtgcgcggcgggcagatcgtgctgctcgacctaggcatgacgggccggcttaatgccaaaacccgttccgtcttgaaagacatgattttcgcggtcgccaaacaggattcgcccgcgcttgccgacggtctgctgcgtttcgccggtgccgaggccgatccggaggattatccggcgttattggccgacttggatgtgatcgtcaaggaattcggcacagtggatttggccgagctggatatcgccgccatgctcaccgcattgacgcaaatggcgcaacgacacggcattgaagtgccgagcaccgtcaccacggtcgggcgtgcgctggtcactttggaaggcctgctcgacgagttcattccagacgtgaatatgattcagatcatctccgaccatatcgccgcaagcacgtcgaagaaggatttcgccaaggatgaggcgaaatcgctggttatcgaaggtcatcaggcgctgcacagcctgctcgctgccgccaatgagctgaaagtggcctcccgtatgcttacgcgcggccagttgcgcgtgaatatggagatggtcggttcgcaggaaccgatccatctgcttgccaacatggtgaacaggcttacgatggcgctgatcgtcgtcggattgttcatcggctcgtcgattgtgtactatgcgggcatcaaaccggtgattttcggtattccgatcgttggtttcctcggctatgtgatcgcgttcgttttgtccgtctggatcgtgttcgacatttacttcaagggacgttccaacaaaaagcgatgacgctagtctagggggagagtggattcgcgttggatgaggcggcagggaaggtattccgtgccgtggtggggctggccgttgatggcgtccatcaggtagcgggcggctttgcggccgatgagttccgtttcattgtcgatgctggtcagcggcgggcgggagctcttggtgagcacgtcccaattatcgtggccgatcaccgccacatcctcaggaatgcgtagatgctgcgacttcaacgcgtcaatgcatcctcgtgccagctgatcgctctggcataccacggcgtcgaacttcacgccttggtcgagcagcagtctggtggcggcacgcccccaattctcgtcccaacggccatagcgaatcgggccagccggttccaaaccaacctcggccaacgcttccaacgcgcccttggtgcggtcggtggaggccgtatacgtttcatcgccgccaataatggcgatacggttgcgtccgcacgaaatcaaatgatttacggccatgcgcccggcgtccacattgtcacacgtcaccgaacaatcgttggtgtcggtggaaggaccatacacatacaccagcggcacgccccaatcacgccccagcgacgggcgcggattcgtctcgcactgcacaatcagcaggccgtccactttcagcgacagcagtttctctacatggctgcgttccagcgcatcgtcaccgcgagcattggcgagtagtaccgatgtcgattgtgcgcgcagctcgttttcggcgccaataagaataggcgtggagaaacggccttgcagatcggaagtgaccaaaccgatggttccgcttctgccgcttgccaacgattgcgccagcttgttcggggaatagttgagttgccgcgctgcctccatcacgcgctcgcgggtgtcttcactgacgcgcggtttgccatgcagcgcctttgaagccgttgccaaagacacgttggccagcgctgctacatcttcaagccttgctgttgagtgagtatctgcagttgccatgatgttcccctttttttacggtgtgacgaaaacgttggctgcgcgtcgatgcgcttcgccgcccttgtattgcgtaatattatacgacaaaactgcgaaagttttcgcatcgtgtcaaaaagtggacaaaacggctttatatagccgattgctgacattttcacttgcaaattgcgaaactttcgcatttgcgaaaatgaacacatttttctttcgcattttctgcatctcacgtcattttttgctgtcataaacgattcttaaaatgctaagaatcgtttatttataacggttttatcgacatgaatacctttgcattctgatgtgcgaaagcgattttgcaaaatctggagaaaaccatatactgagaaaaggctttcgcactacggttcaatcgaaggagaacaaccggaaatcgtgaaggcagacggcggaaggcccgccggatggctcaaagctgagcgatacatagagaaagaagtagacatggtgtctttcaacaaggtcactcgcgttattgccggcatcgcggcaaccgcgttgcttattccgatggctgcatgcggcggtggttccagcagtggtggatccgcggctccggccgatattccggcagccggcactgatgacggcactgagatcactctgtggacccgttctccgctggagcgtcaggccaagaacgcggtgaaggcctacaacgcctcccacaagaaccaggtcaagctggaaatcattccgaacgacgatatggaaggcaaggttggtggtgcctcccagaccgattcccttccggacattctcgccggtgacgtggtgcgtattccgtactgggcttctgaaggcatcttcaccgacatcaccaagcagatcgacggactcgacaacaagtccgacctgcagcagggccacattgaagccggtaccgtggatggcaaggaatacacgctgccgttcatcaccgacgtttccgtgatggtatggaacaagaatctgtacaaggaagcaggccttgacccggagaagggcccgagcagcatcgacgagttcgttgagcaggccaaggcggtcgcggccctcaacaaggacggcgtggcaggctcctacttggccggccagtccggtggcgctctcgtgttcgacctgttcccgtccgtgtgggctgacggcgaatccgtgatgaacgcagatggcaccgaagccaccctcgacaacgattccatgaaggccgtgctcgacgcctacaaggaactcgccaacaccaccaacggcttgggcgcaggctccaaggaagaaaccggtgccacctggaccgctccgttcgccaacggcaacatcggtgtgatgccgtatccgaacacctcttccaccgcactgttcgaagctgagaaggacggcggcttcgaagtgggtgtcaccccgatcccgggcaccaaggaaggcaagacctccacgttcctcggcggcgatgccatgggcatctccaaggactgcaagcacgtcgctcaggcttggaacttcctcgcatggctcatgagcgatgacgcccagaaggaagtcttcgcagccaacggcgacaccgcatccaacatccagaccctgaagaccgcctacgacgatgccgatcctcgcgtccagaccatcaactccgtaatcatcgacggcaatggccagaccccgaagtccgcagctttcaatgaggccttcaacgcagccggttccccgtggcagctgctcatccagaacgcagtctggggcgatggcgatctcaaggccgacaaccaggccatcaccgacgtgctgggtcagtgaggtgagccactgaaaacgaacttctcctcctttttctcctttccccgatttacataacttaagaacaactgaatatcgaataactgaatatcgaaaacaaaaatcgacagaccacagttgtggtctgccatgaagatcgacaatacttcaaaaacaatgtcggtcttcatggcggatttcaacggccgcacgagacggaatcgcacttccaaacgcatatccaatcgcttggccatttatgtcgaaaaccccgaacgattcaagagagagtcgccaaaagtgttccaaggagggaatatgactactgtttccaagaacgctgcgccagtgaagacgcatcgttccaaggccaaggcggaggcaacccgtcgtggcctgctgtatgcgctgcctgattggctgatgatcatcatgctgttcttcgtgccaatcgtactgctcgtcatcatggccggttcccgctggtcgttgatgggcggtaaccgtggttggaatttccctgagaatttcgtcaaggttttcgaaaataaactgctcggacagtcggtgttgttcacacttgaatacaccgtgatcgtcacgattttcctgctggtgctcggccttggcctggcgctgatcgtgcaggaaagcaccaagtggaacaatatgctgcgcacgtgcttcctgctgccgtccgcaaccggtctcgcctctgcttcgctgctgttctacgcgctgtactccccgcaggtgggccccgtcaccaagatcctgagcttcttcggattgatggatgagggcggctccgtgctcgccaccggccagagcgcgctgtgggccaccattattgtgatcgtctggcgtttctccggctactacatgctgctcatgatgatcggcctgcaggccattccgggcgacctgtatgaggccgcgcgcatggacggtgctggcacgtggcgcattttccgttccatcaccctgccgctgatgaagccgaccatcgtgatgtgcctgatctactgcgtcaccggttccatcctcgcgttcgaccagttcttcattctgaccaagggcggtccgaacaattccaccatgaccgtggtgcagcttatctacaacttcgcattcgattccaagaaggatctgggcatggcggccgcactgtcgctgatcgtgcttgcggccctcgtggtgatcaattccatccagatgcgcggtatgcgcgacaacaccaagtgagcaaggggagggaactcacatgactactccattgtggaagcgcgtaatcgtctatattctcgaaggtctgctggctctggtcttcatttcgccgctgatctgggtggtggtctgctcgttcagtccgcagcctggttccgcacaatccaagggctggggtgtgaacaactatctgacgttgttcggctaccaggaaggcctgccgaagtacctgttcaactcggtggtggtgacgttggtcgccgtggtgttctccgtggtggtgtgcacgctcgcaggctattcgttctcccgtttcgactatccgggccgcaatctcggattcatggtgacgctgtccattttgatggtaccgtatgcgtctctgctgattccgctgatggtgtggtacaaggatattggtctgaacgattccttgctgggtgtcggtttggttattaccttgttccagctgccgatgagcacgttcatcatgcgtaatgctttcgatgcgattccgaaggatatggaagaggccgccatggtcgatggctgcaactccctgcagtcgttgattaagattctggtgccggtcgtcaagccgtcgatggtcactgtcggtctgcttgctttccttgaggcttggaacaatttcatgattccgctgtacctgtcgagttcgtcgaacgccacgctgccgctcgctttggtgaacatgcgtcagcagactatgggcgtcattgattacggtgccaccgaagctggcgtcgtaattctgatgatccccgcagccatcctcttcctagccctccagaagtactacgtcaaagggtttatggctggagccgtcaagggctgacacctggcgatgtcagcccttgggagacagcccagtggactgtttccaggctccggcctgagcagaaccgaaggcggagtagccaagagccgtcaagggctggcgaagtccttaatcttaaggaaatatcatgaatgtaactattacttctcctttctggaagcagcgtcgcgaccagatcgttgaatccgtcattccctatcagtggggtgtgatgaatgatgagattgccactgaagttccggatgatccggctggcaatcagcttgccgataataaaagtcatgccgtggagaatctgcgtatcgcagccggtgatgagaccggtgaatttcatggcatggtcttccaggattctgacatatataagtggttggaggaagcggcttacgcactgtcgtatcatcctgatccgcaattgcgggaactgtgcgataaaaccgtcgacctcatcgcacgtgcgcaacaatcggacggatatttggacactccgtaccaaatcaaaaccggtgaatgggcgcatcgtgagcgtttcacactgattcagcaaagccatgaaatgtatgtcatgggccactatattgaggctgctgtcgcctatcatgaggtgaccggtaaccagcaggcgcttgacgtggcgtgccgtatggcggattgcatcgatgccaatttcggcccggaggacggcaagatccacggtgctgatggacatccggaaatcgaattggcgttggcgaagctgtatgatgcgaccggtgaggagcgctatctgaatctggcgcggtatctcatcgacgtgcgtggtcaggatccgcagttctacgccaagcagatcgccgctgtcgacaacgactacattttccgggatctgggattctacaagcccacgtacttccaagccgcgcagccggtgcgcgagcagcagaccgctgacggccatgctgtgcgcgtggcctatttatgcactggaatcgcacatgtggcgcgtattaccggcgatcagggcttgctggatgcggcgcatcgtttttggaacaacatcgtgtcgaaacgcatgtatgtaacgggtgcgatcggttccacacatgtgggggagtcgttcacgtacgattacgatctgccgaacgacaccatgtatggcgaaacgtgcgcttctgtggcgatgagcatgtttgcccgccaaatgcttctgttggaaccgaatggtgaatatgccgacgtgcttgagcgtgagctgttcaatggtgccatcgcgggcatcagccttgatggcaagcagtattactatgtgaatgcgttggagacttcgccggacggtttggacaatccggatcggcatcatgtgctttcgcatcgtgtcgattggtttggctgcgcatgctgcccagctaatgtcgcgcgattgatcgcgtcggtggaccgttatgtgtataccgaacgtgacggcggtcgcacggtgctcgctcaccagttcattgcgaatcaggcaagttttgattccgggttgcatgtggagcagcgttccgattttccgtggaacggtcatattgagtacatggtggaattgcccgctgaggcggctgattcggtacgtttcggcgtgcgtattcccacatggtcggctgattcctatgcgctgacatgcgatggtgttgctgtgaagacggctccggaaaacggtttcgtatatttcgcagttgctccgggaactgcattgcatgtggtgctggatcttgatatggcagtgcgattggtgcgtgccaactctcatgtgcgttgcgatgcaggtcgtgttgcggtgatgcgcggtccgctcgtctattgcgcggagcaagccgataatgccggcgatctgtggacgtaccgtcttgctgatggcgtggatgtcgcggatgccacggttactttcgagagtgatttgcttggaggtgttgacgcggtgacgttgcctgccgttcgtgaggctgcggatgccgtggacgccccgttgtacatgtccgctcagcgtgacgcctcagatgagcggacgtcgctcaagctggtgccctactacgcatgggccaaccgcgaactcggccaaatgaacgtgtggttgcgcagctaaacaaaagaaagacttgctacccggcgctatgagtgccatggtgccgggaagcgggtgagcgcggcgtgatcgattggagccgaatgcgccgcgctgactggaatgagagaccggctgccccttatggggtggccggttttgtcatagcccctagtataagacgggaaaatgcgaaaactttccttttcgcataaaagccatcgtatggcagttcacttagaaagcattggagaaaacttaaagaaaatttgcgaaaccgtattcgcgtcatgtattcttgaaatgtcggtggacgctccaatctcatgtccatcgcacgactctcattcctacagaaagaaagttggatgccagggaacgagccttggcaaccaagggccaacgatggtccatgtaggaggaattgatgacaccatcaacaaggaagaaagggattgtcacgtcattgggcgtgctgacggcagtggccacactgttgtctggcggtgtgatgaccgcatacgccaatgacgcgctggccaatccgaactctgccatggggtatccgagtttcaagggggccgccgacccgattccgggcaccggcgtcgctttcgatccctcgacaagctacctcaagcaggtgttcgatgcggatgttgccaacggtgccggaaccgacaccgcacacgacttctggatcgacaagatgctgacgcgcacaggcaccgcaccaaacggtaccggcaccaacgatgctggcgactacaactatgcgggcgcagacaagaacgaatacctgttctcacgtggccgtgccgcattcatgtacacgcatacgccggaagcacttggtttcgtaggagatgtcgcatactgggatcagaccggcaacgacggctttaccgttgaggtaagcattggcggttccaagcagaccctgcgcgagaacaccgacaagcgcaagcagacgccaagctacttcaccacggaattcaccaacggcgacaagaccattaccgtcaccgaagtcaagtacatcacctacaccaatgtgatggtcgcgaatttcaccatcaccagcaccaccggcggtgacgtaacgctgacagcagcctcgccattcgcacaagacggcaatgacggcgacactgaactgaccggtcgcttcaatgtgaagaatgatctgaccaccatctatccacggttctccggcaacggtttcaccgtaaaggacagcaaactcgcttccaccctcaccttggaagcgaacgtgccacaaaccaccaagctgcagcttggcctgatcgccaacgagttgccggactccaccgcggaatacgaagcccgattcaacggcgatctcaccgatccggccgcttcctacaaggattccgtgaccacctacaaccagtggtgggtcgataacattccttacgtggaaacccaggaacacaatatcgacaaaaccgtgttctaccgctggtggctgagccgtttcaacatgttggatgccaatatgccgggcaatacgttccagtatccgacctccatcgaaggcgtgctcggatacaacaaccagatcgtgctgacatccggcatgttcatcaacgacaccaagtggttccgtaacgccgaatactcgtacggcacttgggtgtcggccgggcagacagctaagaaaggccagtccgggtattactactaccacgacaatccgggcgatccagccaattggaaccacagctacacgcagtacatcaccaaggccggttgggactcctacaaggtgcacggcggcccgtcatcattggctgaagcgttgggtgattacggttccgaagatgtcaaaggtctgctcaattcgcaaagcgagccagacagcaacgacaaccagaatagcaacggcaacaagctgatcgactggtcgtggtggtccatgaccggcaacgatgccgacgcggtgtcgttctccgaacccggtcgttccggccagcgtatggaccgtgccgacggttccgccaacatgtgggccaacgccaatgccgccgcgcaagcatacaaggctgccggagacaccgaaaaagccgctgaaatgcagcagatcgccgacgccatcaagcaggatgtgctcgacaacctgtgggattccgacagcaaactgctgctgcacaagtggctgaacgacggtcaattcgcgaaatacaaggaactcaacaactactatccgtattccgaaggtctgatgccgatcggcaatgatgattacgatagtgcgttgcgcttgttcgaagatgccgacgaattcccgattttcccgttcttcaccgcgaatcaggcagacaagaaggcgctgaatttcccaggatcaaacaatttctccattatcaatgcaactccgctgctgcaaatctattctgcgggaatccgtgattataatgctgcagacaacggatatatcacgaacgaatcgttcaagaaactgctgtattgggtggcgttctcgcattatcagggaggcgacaaccagtatccggaccagaacgaattctggaatatggataataattccgcaggaagcacgattccggagaagaacgccgacgccagcaagaacggtggaaagatcacctaccgttcctggattcaccacacccagcttggcaccaccaactggacgattgtggaagacgtggcaggtatggttccgcgtgaagacaacaagattgaactcaatccgatcgagattcccggttggaaccacttcaccgtcaacaacctgagctaccacgggcaggatctgtcgatcgtatggaacaacgacggcacctacaacgctccgaagggatataccctgtatgtggacggcaacgccgtgttcacctccgataagctcgcccacctcatctacgatccggccagtggaaccgttgaggttgccgatgattccggagcggtgatcaccggcgcgaccaccgccaccatgccgaacgccaacgaagtgacctacgcatcgaacagcagggttacgcagatcttcgcgcagtccggacagaacgtggacgaagcgtccaagagccaggccaacgtggccaaggacgccgatgtggaagccacttacgaaaccaagggatacccggcaaccaatgcagtggacggcaagaacgtgatggaatccttctggggcaccaagggatccaagaacgccaaggattcgctgaccgtaacgttcaagaatggcgtgcagaacatcgacgacgtgcgtttgtacttctaccagacctcgtccagccagacgattgccggctacagtgagccgtcggtgtacacgcttgaatatcaggatgaggccggcgcatggcatgtcctgccgaaccaggtgcgtacgcctacttacgcgggagccaactacaaccgcgtgcagttctccaaggtcgtggccaaagccattcgtgccaccttcactccgcaagcaggtcaggccattggcttgaaggagattcaggcctacgaaaccgacattgtgccggaaggcgaacctacgaaccaggcgccaagcgttgacgcctacattgccagcagcacctcgtccggtgcgcagctggtgggcacggtgaaggacgacggcctgccgtctgacacgctcaccaccacatgggagcaggtgtctggccctgaaaacggcgaagcgaagttcgtcgacgcaaccgctgccaacactacggtcacgttcaaccgtgagggtgactatgtgctcaaactcaccgcattcgacggtgagaagaccggtttcaaggaagtcaccgttcacggcattccttccgacggcacggtgaatgtggcttcacagtccactgcgagcgccagcttcaccaatccatatcaggcgaaggacaatgccaagaaggttatcgacggtcaggtgttgtataccaatactccgaatgagacctggaataattggggtgacaataccggtaccgagccgtggctgcagcttgcctgggatggcactgttccgttgaagaaggcgaagctgttcttctggactgacggtggcggtgtgccgatggtcaagtcgtggaagttgcagtatgcggatgagaatggcgattggcaggatgtgaagcttgccgccggccagtcttataccacgatgcagggtgaaggcaatgaggttcgttttgccgaaacggtggagacgaacaagttgcgtgtgctgttcccgaagggtgccattgttggtgctaccgaatttgaggcgtatgcgcttgatccggtgagcgtggatggcgtgaatcgtatggtgcagactggcagcaaggctgccgatgtgaatctgccgaagacggtgagtgccagctatacggacggttcccgtcgtgacttgagtgttgcgtgggatgccatcactgacgatcagcttgcttccgatagcgagtttgcggtttccggaacggttattggcgcgctcgctggaaccaaggccactattggcgtgcgttccgacgcgcagtctcagactgctggtgcggctcagccgatcgaacagacggtgtaccagaattccaagtcggtggctttgccgtctgtggttccggtgcgattccccaatggcatgcttgacgatcgcacggttatgtgggatgaagcaagtgttgccggcgtcaggttggacaccatcggcgattatgaggtgtccggcacggctgagggttcaagctcgcaggccaagattacagtgcatgtggtcgccgatccgaatggtggtgccgatcctgatcctgagccgacgccggatcccaagccggagcccgatactccgttgactggttggattgaaggcagggccattgacaccacggtgagtgccgaggcgagctggtctccggcttccggcaagctcaacgatggtgtgctggttgacgatacgtggccgtctgatgatgacgccgatgtgaatggccgcgtgtggggcagctggggtcaagcttccgctggcatgtacgcgcagtacacctggagcaaggaagccaccgtcgattccagccgtgtgcagttctgggccaacttcgcggagcgtaatgatgccaagggtggtttggatgttccggacagctggaagattcagtacttggcttctgatggtatatggaaggatgtggagaatgcgcaatactccaccgtgcgtaattccccggcctcacgtgcctctgacgatgctcaaggctggagcgtggccacgttcactccggtgaagaccacgtcgttgcgcttggtgcttgatccgccgaccgtcgagggcgtcaccttcggtctggcggttgccgagtggggcgtgcatgctgcggaaagcactcctgatccagaaccgactcctgacccggatccaacccctgatccggaaccaagcgtggacaagagcaggctcgaatccgccatcaacgcagccggttccgtgcaacaagctaatttcacgccgaacagctggaaggcattctccgaagccatgggtaacgctcgaaaggtgtatgcggacgagagcgccacccaggatcaggtggatgcggccatcaagcagcttgaagaagcccagcagacactggtgaagaaagccgacaccactgagttgaagacggttcttgaccaggcacagggcgtcagcggtgacctctacaccgaagccagcgccaagaagttggctgaagcagtggatgccgcctccaaggtgctgaacgatgagaacgccacccaagctgatgcggatgccgcagtcaagcagctgaccgaggccatcgccggacttgaactcaagccagcaccgaagccggacgacgacaagaccgaccccaagccgaatgccaagcctggaaacaagccggtttccaagtctgaagtcagtgccgcaatcagcagcaccggcagcaatgtcatcggcatcgccgtcgtaggaatgatcgtcctgctgacgggagccgccatcatgctgacgcgccgcaaccgcgactagcgctagcaattgctcaagtcctcttacggatcgcacgaggaataccaacgtaacctaagcaatccgtaagaggacttttcaatatccaatcgtgaaaacaggaatattcatgagcttttcgcacatctcacatgcgtcgatgaagacgctggtggcaggcatcgcagccgcagccaccttatgcacgggagcaatcgcaaccatgcagacagccaacgcggccgacgcaagtaccgcgcccagcgtcgccggacacgcctacaacgatctgccggtcggcaatcccgacgtcaccgtcacacaaatcgacaacagtgcgttgccggcaacccttcgcaaccccatcgggcagaacgaaggaaccaatacccccaacgacctgtcgcaaaactactattccgcagacgcatccacccttgaatacgatggcaaactcttcgtattcaccggacacgacgaggccgaaccaacctacgggtccttcaatatgaaagactggggcgtctacgtaaccgacaatccggaatccggcaaatggacgcactacaagaccatcgccaaagccgacctgttcgactgggcaaccggcgacggagcctacgcaggacaagtagtagtcgacgatgctggcaccgcagacacggccgacgactggttttactactacgttccagtcaaagacaagaacgcagccgcgggagccgacccgttctccatcggcgtggccaaatcaaaaagccccctcggaccatgggtcgacgccatcggagcgccgttgctgactaccacgcagacgcaaatcgaaaccatcgatcccgcattcttcgtggacaatgacggtaccggatatctgcacttcggcaccttcaacagcgaactcgccgtaaaaatgcagcgggacgccaacactggccgcacctcatatgttgccgtggaaaccatggacggaacggcggacggagcgccgaaaatctacaatatgcgtgacgccgacgcgctcgccaacatacccgactacgatgccagcaaagacgtgcttggcagcgactatgcgaaccaagtgaacgcgtcgctgaccttgggtaacaacggcggcgcttatgccaacgggcccaaaggcttctttgaggcggcatgggtgttccgtgaaggagacacctactacaacgtgtacgacggtggcaaacccgggtcgggagtggcgacctgcgtggaatccaactatcaggcgtgcgtgcaatactccacgtcggcaagccctcttgggccgtggacgtaccaaggcgtaatcgtcgaatcgggatcgtccaccaccatgcatccgtcgattcaacgattcggcggcaaatggtgggtcacctaccacactggagacaagactggtggtactgacttccgccgtgcagtctgcatcgatgaagtgacgtggaatggcgggcgcatgaacgccgtttcacatccgaccaaagccgaacggttgcaaccctcacgcaacgtggccccctatgcgtcagtgggcgcgacctacaccgaaacaccctcctacaagggttccgtgaacgacgggcgagtgctggaaactgctgtagtaccgccgaaccattggacgaactatcgaaagatgtcacaaacacaatcctccgattcgctgatctaccagtggaatggcgctgtacgtgtgaatggatcgaaagtctggttcgataccgatgcgaacgcattgcgtgcccctgcctcatggaaactgcaatatcttgacgcagacggttcctggaaggacgtgcccaattccagcgaatacggcgtggatacaggcaagaacgcgcctaatgaagtgacattcgacgcagtgaccaccactgcgctcaaacttgacatgaccgcgcaagccgttgacgggggctatgcttccgttggcgttcctgaatgggaagtatatgcgcaacagggagcagttgtggctgaacagccagccgacgtctacgccaagaccggagacgcgccggaattgtcgaacacggtgaaagtcgcgtacggctcggaaacagtggaaactccggttttgtggcgcacggtgtctgcttcttcgtatgcgcaggcgggtgagttcaccgtgcaaggtgtggttgctggcattgaaaccaagcagcaggctgatgatctgacagccggcaacgtagccgtgaccgtacatgtttccgacgattacgtaaaaccggctgataccattgctcctgccgtgcgtgtggcattggctggcacggctggcaatgatggttggctggtcacttcaccgatcgctcttattacggcttccgacaatgcggctgcgccgatcgcaaaactcgaacttgcggtcggggatggcgcatgggtgaccgtcggaacgaatgtgaacactgcggtaaaggctgtgactggcgagggtatagtgagtgtgcgtgcgcgtgccactgatgcggccggcaatgtgagcgaaatcgctgctgcggaagcgcgtgtggatgctacggctcctacggtaaccgcctcggtagatacggcttcccgcactatgacattgaccgcctcagatggtgctggatccggtgtgaaaacggtggaataccgggttggaaacggcgaatggcagcaatatgaagaaggtgcggcgattactgcttcttcgtcgaagcgcgaaactgtgaactatcgggcttcggacattgctggcaatatgtcggctgcggacgtcaaagatattccatccgatacgtcggtgccgttggccggctatatcgagcaagatgccgttgctactgacgtggacaaaaaagcgtcttcttggacagctggtgttgccgcgcttaacgacggcaaaaccattccgggcgattgcacggttgataacgcctgcatttggggcacatggccgaataccggtgaaatgaagctcgactacgaatgggatcgcgaagtcaccatcgattccagccgtgtgcaattcacctccgatggagggggcttgggaatgccggcgtcgtggaaactgcagtattgggatgctggaacgaatgcgtttgtggatattcccgatgccacatatacattggtcaccaatgctcccggcgcttacggtaccgataacggcggatggagcgaggcaacctggactgacgcggtgaagaccactaagctgcgcatggtgattcaatccggcagtgcatcgccggccgccgccgaatggcaggttcatgcacctgaaccgactccggaccctgcacctgaaccgactccggacccgacccccgatccgacgcctgagcccgagccggaaccaacgccgactccaaagccgactccggataacaataacaacggcaagcaggacggtaataatgccaagccttctgcgaaaccgcaatcatcgcagcaatctcagtctcaacgtaagaagaagctaagctctacaggcgtcgctactacggcaatcgtcattgccatgacggtgctggccacggcggggtgctgcatcttcgtagccaagcggggcaagctgcgtaactgaatccaatataaaagtggtaagttctcagcctcggtctctggactgaatatgtgtgcttgacgcactcaaggtaccgttacgcggtcttcgcggcaagccgctcacttcgcctgaggaaaacccactgggctttcctcttcacggctcagtggccaagcctacgatcaagcagacgtattcagccgccgacctttggggtccgacccctacgtttgtgtgaactcggacgtcatcggaccccattttgctcataactcgcctatgtatggcagatttgcgggtctgtcaggaagcatctcgcctatatatggcagaagacttcgctaaaaagccatatagggggtatgaaaacgcatgttttctgactccagtctgccatatataagcgagatgcctcgtgacgagactcaaaatctgccatatatagtcgagatatggctcggctgttggtggcttgagacggcgacatacgatcgcggatcgcgtaggtggtcgccgtttttgtgatttatgggctaatctcagaagagacagattcgatggccgcgaacggtgagaaccaacgcgagagaatgcgcgagcggccgcgtaagggaggaaagcccatgtccaaatcattcgtcaacaaggcgctgctcggcggcgcagtcgctgcaggcgccgcagtgtgggcgatcgcgccgcgtaccttctccgacaagcgccgcaactatgtgccgtccattcccgacgtgtggtacgcgcatcgtggcctgcatgacgcgggttccggtctgaccgcgcagtatgccaacgagagcggcgagtatgtggcgctggcacgtcgcatggccatgaaggccggctatggcagccccagcgtgactggtgcgatcgctccggagaactcgcttgcggcattcgcagcggcttgcgaagccggctatggcatcgagcttgacctgcagatgaccgccgacggcgaaatcgtggtggtgcatgacggcgatctgatgcgcgtcgccggagatccgcgccgtatcgccgatctcacgtacgatgagctgacccgcatcccgctgttcccgaccgacgcccccggtgccgctgtggcagcgccgttgccgggttcgcttgaaaatccgccgctggtcaccacacctgacagcgctccggaagggtatttccagcatgtgccactgttcgccgacgtgctcaaggtagtggcgggtcgtgtgccgctgatcgtcgaatacaagttcgacgacaattccaagtggggttcgcgcgatgtcgagctcatggaaaagggcgacgcgctgctgcaggcctattccggcgcgtatgtgatcgaatcgttcaatccggcagccgtcaactggtataaggagaaccgtccggaagtgtgccgtggccagctttcctggtggccgcagggggaggagaagccgtctgatcctgctgcgctcgccaaggaatatgcggccggtgcgctgattttcgactggatttcccgccctgatttcgtcgcctacgattggcatggcggcaacagtccgcaggtacggttggctcgtttcatgggtgccgttcccgtgtcgtggacggtgcgcagccgcgacgagctcgcccagtgcgatgactggttcgaccatcatattttcgaggcgttcgtccccgacgagcagtagaggttttacatatgatttcggcctgccgccgcatgatttgcgttgtggcaggccgtttttattcgatttacttgattgactgattgggttgattcagttgagctctgatgcggtcagtcgatcacgccatatagacggtcgccggcatcgcccaagcctggcacgatgtagcacttgtcgttgagcttctcgtcgacggcgcacagcaccagcttgaacttaatggatgggtcgaggttctcctcaacgaacttcaggccttccggagcgcccagaatgcacacggcggtaacatcctttgcgccgcgctcggccaggtaatgtgttgctgcgaccagcgtgccgccagtggcgagcatcgggtcgatcaggaagcactgacggccgctcagatcgtcgggcagacggttcgcgtacgtgatctgctgggttgggttctcctcgtcgcgcttcatgccaaggaagccgacctcagcggacgggatcatcttggtcatgccgtcaagcatgcccaggccagcgcgcagcacaggcacaatgatcggcgccggggaagcgatgtgcttgcctaccatcggagcgacgggggtctcgatcggcttgtccacgacttcgacgtcgcgggtggcctcgtaggcctcaagcatcacgagttcggaaacgagctcgcggaacgtggaggacggggtgttcttgtcgcgaagaacggtgagcttgtggtccaccagcgggtggttcaaaacatgaatatccatgtcttctaagcgtagtccataatcgcgaggaaaagcgcgggaactgggaaaggagccaagaaagaaactgaaaatcgtatgaaaaaaacaacgaaacttaagaagagggaaagcgccgaaccacgaaagcgcctgtcggcgcaaaggccgctcgcagcggcaaaaaatggagcccggggctatgcatggcccgacgcggattcctattctacagatgctgcagaccgtacgttacgtcgtgtcgcgaattgatggtgcgagcgccgtaaaacacttccggtagcggtacagaggtgggtgcagaggcaggtgcaggggacgggtacggaacgcgttactccagttttccgcgacgccacagattcgccccatggcgaaaatccttggccgtgacgaacagattgccggccgtgtgcatcaaacgggacgatttcgtacgtacctgcttttccatggcggaaatgccggaatcgctgctatcggaaccttccgcagctttcaatcgtgcgatcatattgcgtgcctcgatgcgcaatcccaacgcaaccacgtcggtgaacgcggccgcacgttccagcgcaaccgcaaaatcgccggtgaacgcgcctgcgagaatcgaatcggcaatatgcgcaatgtcatcttccgtgggcgcctgatcgacgccggcaatcgccgaggcggtagtggcaaccggctctccagcgcgccacaaccgcgcgatcgactcgcgattcttccgcatccacgtgcgcagcagatacagccgccacagaatgcccggcagcgaatccggctcggcgctgctccacagttcggcgatcacgtcaatgccctcgcggtccaccagcgtgagcacgcgctccaccagttcggcatcctgcgtatgatgcacgcggtccaacagtgcggccgccgaagcgtggctcatctcgttgatttgcgccggatcggcacctcccgcgatattgtcggccatcatctggtcgagttgccccgggcgggccggacgcggcgatccggtgttggtgaaaccggcggaacggcttggtacaaccgatccggaaccgtaatgcatgctagtagacaatgggcgaaaccttttgaatatcgataatgctgggaccttgcggcgtatcgattataaacagcgctacggcggtgccggtaggcatgaacggcgttttggcgatgagctgcttggagagcgctttgcgggcgcatagtccgcgcaagtgatcgaacatgcctccgataaccggtcggtgcatgcagatcgccgtggtttcgcgggtctcgagcgtgagctggatctgcttgaggaacgccagccatgcgatggtcgggtgctcggcgaaggcgtcttccgtgagcgcgtcgatgtgttccatcgggcgttcggtctgccagctaagcacctgcagtgtttcctggcagcgcagccatggtgaggttgcgaggcgggttgggttgtagcaggcgagttcgcggttgagtgcgaatgccgcggccgcgcctttcggagtgatcggccggttcgcgtcggtgcctttccaggatttgcgcgattcggccttggcatgacgcacgatcatcagattctgcgcggtcgcggcaccctcctgtacgcggtccacaaaaatggcgagggtgtctttatcggtggaatgcgtgaggattttacgtgcttcacgtacggaaacccacacgatatcgttgatttcgcctacatccgcgcgatgcacggggccgaatgcgtcaagcagatgttccgcatcatctccggaaatcggttgcgccatccaatacaacgtgtgcttggtgtcgacggcgcgatcgtgtgaatgccgggttttcttgccttcttcggacagtggatattcgacttcgcacagatacgggccgagtgcgatggaaacgcctgtctcctcgccgatttctcgcactgcggcatgacgatgcgattcgccctgctcgagtttgcctttcggccagctccagtcatcgtactttggtcgatgcacgatgcacacttcaatgctgttgagttgttcctttggagttttctgcgctgcgattgctggattttccgcgatttcgctaccggttttccaccgccatacaatacccccggcggcttctacgacacgtctcatgctctcgctcatatctttcattgtaagtggttgggcacgggtttccccatgattgcgcgacggcaatcgtgccatccgagttttcctgcgttttcccacgatggtgatcgcgtatgccgcaacataggaaatggccgattctgcaacagcagaatcggccatttcctacggtttagtgccttgccggtcggcgcgtatgcttcttgatgagatattcctgggaatcgaccagcgggcgaccctcctcatccttcgcatgacgcacgtaggttccgtcggctgccatatgccacgaggtggtggaatcggccatttgcagatccacgtacttgatcagctcgtcgatctgctccggagcggtgatgcgtaccagcgcttcgactcgacggtcgagattgcggtgcatcagatcggcggaaccgatccacacttccggacctgcggccggaccttcaccgatctgcgggccatcggagttcgcgaatgcgtagatacggctgtgctcgaggaaacgacccagaatggaacgcacgcgaatgttctcggaaagtcctggaacacccggcttgagcgcgcagatgccgcgttccacgatgtcgatcttcacgccggcctggcttgcacggtatagcgcgtcgatggtcttctcgtccacgatggagttgaccttgatcttaatccatgcttccttgcctgcgcgtgccgcatcctcttcgcggcggatgcgctgaatcagaccggaacgtacggtacgcggcgctaccagcagacggtggaagctcgacttcggcgcataaccggacagctggttgaacaggcgggtcatatcctggccgaccaccggatcgcaggtcagcaggccgagatcggtgtagatgcgggcggtcttcggattgtagttaccggtgcccacatggcagtagcggcgcaggccgtcggcttcctgacgcaccacaaggctcagcttgcagtgggtcttcaggcccacgatgccgtacaccacgtgcacgccggcgcgttccagcttgcgtgcccatgcgatgttggcgtcttcgtcgaagcgtgccttgatttcgaccagtgccagcacctgcttgcccgcatgcgccgcgtcgatgagcgcgtcgatgatcggggagttgctggacgtacggtacaacgtctgcttgatggcaagcaccttcggatccgccgcagcctgcgctaggaacgcctgaacggaggtagagaacgaatcgtacgggtgatgcaggaggatatcgcgttcgcgaatcgctgcaaaaatgtcttgcgcgcgggacgactccacctcggcaatctgacgattggtggtcggcacgaacgaacggtacttcaagtccggacggtcgatgccgccaagttcgaagagcacggtcgcatcgagcggtgccggcaggcggtacacctcatcggcgctgacgcgcagctggtcggcgagcagctgggaaaggaacgggctggtttcgtcggaaatctcaagacggatcggcggtccgaaacgacggcgcagcagctccttctccatggcgttgagcaggttctctgcatcatcctcttccacgtcgatatcctcgttacgggtaacgcggaaggatcgcgcttccttgatgatcatgcccgggaacagggattccaggtgcgcgatgatcaggttctccatggtgatgaagccgtagcgcacgttggtggcatcgtcgtcggtcatgtcgtcgacgggcacgagacggttcaggtttccaggaatcttcacgcgagcgaagtgggacttgccggaagccgggttctccaccagcacggcgaggttgatggaaccgccggaaatgtacgggaacgggtgggccggatccacggcgagcggcgtcagaacagggaacacctgctgacggtagtagcgagacaggcgctcctgttcggcggcggtgagcttgtcccagctcagcagcacgatctgttccttcgccaggtcgggaagaatgtgatcgatcatgtagtgcgcgtgctcgtcctgcaggcggtgcgcctgctcgctgatggcgcgcagctgctgccttgggctcaatccggaggcggccgtcacggcgatgccggtgtcgatgcggcgcttcagacctgcgacgcgaaccatgaagaactcgtcgaggttgttcgcgaagatcgcggcgaagcttgcgcgttcgatgatcggcagatcttcgtcttgggcaagttcgaggactcgcttgttgaacttcagccagctcaactcgcggtcgaagaagcggtcgttcggcaacggctcttcgccggcctgaagctcacgcttgtcgtttttatcggtctcggcgatatgctcagctatctggctgcgcaagatcgccttcgagggtgcgtcaaaaatctgtgccatactttcctactttatccttaagtagctggaaatgctgtaaaaagccggcaaaatttagctggagttaacattcgttcgctcattgtgcaaattagggtgtcgacacgccgtgtttttgtcgcaaacgcacgcaaacgaacaaacacgccttgcgtttcgcacacgatggagcatttttatgattcttgcgatcgtaaagcaacagttgcgacaaatacggaacatcagccggtttcggtttgcgattgccggattgctgagcataattacgaagtacaagaacaacttaaagagcagagcccacaaagagtgtatggccaagataggtcgttacgttgaacgggcattggatagacttaccgttacgacgatgttgttgtgcagagattctgcccttaaggttcttgcaaggaaggcccgctcggcgggccttcctttttgtttgcctgttctcagggagtttttcgggaaaacgacggacgccgattatcgtcgttgtgtggataacggtgcataacacgccggggttgtggataactcgcgtcctccgaccacagggccggttcagcttgcaatggtgctcgccgaagcttttcaatcgacggtatgagtaatgcaacgtctttttcgaatgctcctccggtgccgctgccgtcgggcgggctgttgccggtcgccggcgcgatcgcgccgcaagcgtcaccgccgacacaacgcagaaccgtctctgcgcaacggttctatacgccgccgggatcgaatcgcggtggaacgcaactggttggcgctgtgcctggaacgtatggcatggttgcgcaatgcggtcgcgcatcggtggaggaaccctgcgatatgggcaatgtggtggttatcgactccgtggtggcaggagtgggcacgagcactctggccgccttactggcccgcgagctgagcgaacgcggcctcaaatgtgtgctcgtcgacgccgatctgcaaggaggtgggctggatgtgcttcttggcgtggaaaacgaggacggctcacgcttcggggaaatcagcgctccgcttggcaatatcgacggcaaagcgctactgcgggagctgccaatctgggatggtgtgccattgctggcatgcgatccttggaaaaccgaaaatccgcaatcgtgggaagtgcaagcgtgcattcatgcgctatcgcaggtgcgaagcgtggtcgtcgtcgatatggggcaatggaacggactgcaggatttgacggaactgcgcaaggccatccgcattaccgtggtcgaactgacggtacttggtcttgcgcgggccaaagcgaatctgcgggcgcatcacggttcaatcggagaacacgatgccgcaacgcaggaacgggagtttctcgtaggcgtgcaaccgcgcggaaccgtacgcgaccatggcacgacggcaatcgaggaagcggcggaatacctcgactgcgatatcaccgcggtcatcaaaccggatgccaagctttgcagcgaactcttggaagggcttggactgcgcaaacccaatcgtacgaacgcgaaagccatcgcaacgttggcggatctcattcaggaagcgttgggagaaaagagcatcagtcatggaactcgggccacttagcgacatcgcatccgagccgggcgtcaccgacatcgcggtaacctgcgacggaacggtgtgggtggatcgcggccaaggtatgcggccacatgcattgcgcgtgccattcagcggtccccaagccatccgcgatttcgccgtgcggctgtgctcgcagcttggcagaaggctcgacgacgcctgcccgatagccgacgcctccaccgtggaaggcgtgcgcgtgcacgcggttatcgcaccgctcgttcctcaaggcgccgccatcagcatacgattgccggacgttgttgcgcccagtctggaatctttggcggaaaacggcatgtttccaagcggatggatgcccttgctggaaggattcgtggaacgaagggccagcgtgctcgtgaccggcggaaccggagcaggcaaaaccacgctgctcaaagcaatgcttatgcgatgcgcgccgggggagcgcgtcatcaccgtggaggaggtgcgcgaacttggcatgctcaaccatgccaaccacgtgtcgctggtgacgcgcggcgccaacatggaaggcaaaggcgccatagggctgtcgcagctgatatgcgcgacgttgcgtatgcggccggaccgcattgtggtgggcgaatgcaggggcggcgaaatcgtggatctgctgcgcgcgctgaattccgggcatcgcggaggcatgaccaccttgcatgccaatcaggtgacggcggttccctcacgtttggtggccttgggattgctctccgggctgaatccgcaagccaccgcggcgctcgcgcaagacgcgttcgacgtagtgctgcatgtgggccgagtgggaggcaggcggcgcatcgcgcaaataggacggcttgaattcgcagaggggaaactgcggggaaacctattggccgggtggaacggcagccaaatgcgggcttcgcaacagtggcctgatttcgtgcgcgtatggagtcgttgaatcgaggtgggcagatggaaagcctcagcattatttgcgcggtattgtgcggactggccgtatggctgtggcctcgccgaaacgtatgcgatgtgggcgaacgggcgggaaacgtagtggggcgcgcaggcgaaagccttgatgaaaaacctgatggaggattcgatgggcggtctgacggaatcgaagaggcgaacatgccgtcgaaaccattgcccgccatcggatgtgtggcgtgcgtggcttccctccgcgcatccgtgcgcagcggagccacattggtgcaggcgttcgaagaattgggtggaacgccgttcgccacacccgaacttaccaggcttcgcataaccatggtgatccgcagccgatgcccgcccaaagagcaatgcggccaagtcgaacggctgagcggcgagctatatgcggcctgtcagctgagcctgacgctcggatgcgaaaccggccgatgcctgcaggcggtggctgaatcgttgaaacggcaacgattattggatgatctgcgtgccaacgcattcgccatgcccaaagcgacggtgaaactcctgatggcgttgccgcagctcaccgtacttttaggggaaggcatgggagcgcatccgttgaccttcctcttttcaggggtcaggggttgggcatgccttggattcgcttgtgtctgctacgggttcggactcgtatggatacgcgcgttgatgaggcaagacgatatggacggcaagacggcatgaatggtatgacgatatgaaaggaattatgtaatgactggcatatggacgctgacggcggcggtgtgcgcggccgaagcgatgtggctgaagcagtggaggccggtccgtgtgccagccgaccttgcgcccgccggacgagtgcgggaacttccgctgccgctggtattggagatgctcagcgtcgccatacggcagggatcctccattccacgcgcgctgattgccgtgggcgatatcgctgcgggagaattcggcgcgggactacggtcggccggagaacagttgaacaaaggtgtttcctgggatgatgcgtggccagatgatggcgatcttgcggtggtgcgcgatgcgttcgcctcgtcatggcacagtggcgcctcgccggtggaacgtttggaaacagcggtcgaacaattggattgggatgagcgctcgcagatcgaacaggctgcagcgaaattgtcggttcgtttgttgctaccgaccggattgtgctttcttcccgcatttgttgcggtggggattattccggccgttatgtcgtttgtgggatgacggcaggaaagcaacgtgggaaatatggctcgggaaatgtgggaaacggacaatcctcgaagaacgatgttttgtggataaatgtggatgacacgccgtggttgtggataacccacgtcctccgaccacaaccctgaaaaaacgttccgacgggcacgatgatgcgcaacactgggtgcactcggccatctggccgaggttgttcgaacgaaaggaacgccatgaacaacgaaacgccaatcaacgtcgatggctcgccagacctgatgggcaaggcaggacagctgctgcatgccatgcgtgaacgggccggcaaagcggtatgcctgctggacgcgcgtatgcgcacgctgaccgtcgaaccggaggaaggcgctgccactgccgaatatgcggtggttttggttgccgccaccggattcgcagccgttttggtgggcattatgaaatccgatgccatcaaaacgctgctgaccaacatcatcaagaaagcgctgagcgtcgggtgattcatgctgaggcaatggtggaaacgccataccgatgatgccgatgagggagcggccaccgcggaattcgcggtggtgctcccctgcgtggcggcggtggcgattttggtgttgtgcttggggcgtgcgtctgtggtgtccatgaattgccaggatgcggcggcggccggtgccagggctttcgcggttgatgatacgggcggcgaatcgaaggcgaggaccgcggtcatggcggctgcgggaggttcggcgacggtacggttcgagcgtggggcggacttcgtcaccgtcacggtgcaatgccctgtggtgccggatccgaccggtgtgctgcccactcgagttaccggcaaggcgacccgctacttctagcgttgctccgaagcgtgctggtctctgcgcagtgagatgcgggattgttggttgtggcctgtgcatggaggtctgtgaggtttggagcttgcgacatacgacgtgtgaaacatgttgtgaaacactattggcaaccatttgatggatgcgggtcggaaaggaatgggtaatgtgaaacgccttgtgaaacattggtttgcttggattcgcgggtccgatgagggttcggggaccatatccggtgtggctttgatcgcagtggccgccatcatgctgggcgcggccgcgtcggcgggcaatctgctgctgtgcttgcatcgcgcgcagaatgcggccgacctggcgtcggtagcggcggccaatgcgttgtattcgggatcgtccgatccttgttccgtggcggaacgcactatatccggcaataatgcgacgatcggatcctgcacgatagaaggcgaggatgtgctggtcgaagcgcaggtcggcacgcaaatgccattcgtatcgcatgtcggcaaacagtcacgggcggggccgattgtctgcgaataagcgtggtgcggaacggtacattgtgcgggaaatcgcgcttcgtaaaaagggatctttctacgtaaaggaacattcgttccacaaaacacggccatttgtatggaaagccgttcgcatgtggcgtgtggagcgaatcgcggttatcgtactgaagtatgagcgaaacgtcatgtgtgaatgcgaccgttgccgttgtcggcaatccgacgtcaaacaaaggcaagggtgccgaggtcggcaagcaggtggttgagctgctgcaagaggccgggcgcaagcatggcttcaacgtgatcgacgtgaccggcgagagcttcgacgattccttggcgaatgccaggaatcgcaggaacgaatacgactacctggtggcggtcggcggcgacggcatgattgcgcttggagccaatgccgtgggctgttccggtaaaccgttgggcattgtggcgacgggttccggcaatgatttcgcccgcggtcttgagctgccggtcaatcgcgtggaaaccgctgtcgacggcatcgtcggcgcgattgtgcgcggcacgcatattgacgttgatatgggtttggccacgtcgttgcagggcgggtatgccgtcgattccagtaccggcgatgatctggtcggcgattcggacgtgccattgcgcccggcggtcaaccgcttctacgcgggcatgctgtcgtgtggtttggatgcgagtatcaacgaccgtgccaaccattcccgcttgcccaacggttcggtgcgctatttcgtggcggcgattgtggaattgacgcatatgaagcggtacggataccacatcaaagccacgttggccgatggaacggtggaagaaagagacattatttcaccgttgcttacggtggccaattcacggcatattggcggaggtattgagatctcgccgtattcgcggttctctgatggtttgcttgacctggtatggctcgaccacgtgcccaatgtcgccgaatgcgtggatgcggtgtctcacgcgtatagcggcaagattctcgggtgcaaggtgtttgggtggaagcgtgtgcgcgatatcgaaatcacccgcgcgcaagagggtgatgagccgccggtcttgatggcggacggtgaatatgttggtcgcctgcctgtcaaggtcgtagttcaagaccgtgcgcttcgcgtgctggtgccgccggccgtggcggaaagccaagctgccaacaccgaagagaaagtgctggaagccatcaagcgtgatcaccgtgatcctgtcaccggcaaaaccgacacctactacgcgaagcgctcgcggtagtgcgtgcacatgccggtcaaaccgcaacattgcatatcgaagatggcacgtatgcaactgattgcgtgatcggcaatcgtaagcaatcgcaaataatttcgcgataataacgaaaaatccagtacccgcaagatctttatcttacgaataccggattttctgtaactagcgaacgccgtaactatcgaacacggattgcgatcaggcggcgacttcctggcgggcgatggcctgctcgtagtcgcgggtgcccttgaagacttcctgcagccacgggttgacgtgctgcttcttcgcgcggtacatgatgtagccgagtgcgagcacgttggccacgagcgcgatgatcgacacggtcaggttcacgttcggattgttcaccgactgcacggcgaacttggactcatcctggaacatggggaacacctgcgcgaacatgcaccagatggcgagcgtgttggcgcggttctgaatccagccgcccttgttccagaagaagttcgccacggtcggggcgagcagcagcgcgaggccgcaataccaggagtgggtcggcaggcagttgtaggtgtagcagaagttccaaatatcgtatgcgacgatgaatacccaagtcatgtcaggccacagcatgtcctgcttcttctttgacacgtaaatgccgaaccagccggtcatgcaggcgatgttgatcaggccggcaacgccgttgaacacattgtgccagccgccatacagcgtcacgccttcggtggaaacccatgtggtgccccaagcgcgaatggccgattcgaagtcggaggccacggcgataagaatgttgatggccacgatcacgaacgggaagcacttgaaccattcggatttgccgatcttgccccacttgtatttgagtgccatgaagccgatgcagcctgcggtggccgcatatagcttggcatagtggaaccagctggtcatatgcacgtaggtcggattgctgagcgcccattcggcacccatcgcggcggccacgtaaatggtgatgaagtagatggtcagaatggccggcacgatcaggaacgcgatcacgccaccggtcttggtgcgacgggccagctcattggcgccgatcaggcagcagaatacgaggatccatccgatccactggtatatggcggtgtagccatagacttggaacaacatcgctcttcctttctctcaacacgtatgcgcgcggggtgagctgtgtttacatgtattcgttcaggtgcagcgtctgtgccgcgacctgtctgatgacggtgtcttcaatgtcgggatgcagtctgatcagcgaaatcaggccaacgatgagcgtatagaacgtctcatgctcgttggtgatgggcatgccatgcaatttctcgaaatcgcgcactgtcgaattgcagatgtattccgcaatgcgatcggccacgcggtcgatgaatttgatgtacagtcccgcgttgccgtcttcgatcatgcgttggctgaacgggccctcatcggcgatgagggaacgggtcagtcgcaccacgtcatcgagcgctttcgagatgttgccgacttctcgattggcgttccactcctccaattgcgagatgacttcgtcgatgacgtcgtcgagcacggcgtccgcaacttggtctttgtcttggaaatagtggtagaagagagatctggtcatgcctacgcgacctgcgatatcgctgatcgtgattttcgaaaagcccttttccaggcagattgcgcgggctgcatgcacgatttgcgcgcggcgtgcgtctccgactgttgttgcggaggcgttgtgctgtccgtccatggctttctctccttcgttcgagtggcgtctctcacctgcgcgacacgttgacactctgtcaatttcttgactgccctcagtctaaaccgtacattgacacaatgtcaatttcgtagtgtcgatgtcgtcactcccagcttaaacgttgccgcggcgcttgtctttggggacacgcgcttcaccgttacgggcaggctgtgcggccggtctttgagaaaaaacgtgtcgtaattaatcggtagcctagtgacaccacagcggaaggaattgcgatggcactggcactctatagaaggtatcgtcccgacacgttcgacggcgtgatcgggcaggatcaggtcacgattccgctgatgcgagcgcttgatgagaacaaacttacgcacgcttacctgttttccggtccgcgcggctgcggcaaaaccagttccgcacgcattctcgcgcgttgcgtcaactgcgcgaaaggcccgacctcgcacccgtgcggcgaatgcgaaagctgcaaggacctcgccacaggcggccccggttccatcgacgtggtggaaatcgacgccgcttcgcacaacggtgtggacgatgcccgcgaactgcgcgaacgtgccggattcgcccccgcccgcgaccgctacaagattttcattctcgacgaagcccacatggtcacgccgcaaggcttcaacgcgctgctgaaaatcgtggaggagccgccggagcatgtgatgttcatcttcgccaccaccgagccagacaaggtgatcggcaccatccgttcgcgcacccaccattacccgttccgcctagtgccgcaggaggttatgggcccgtacctcgagcggatctgcgaagacgagcatatcgaagccgagccgggcgtgctgcgccttgccatgcgtgccggcggcggttccgtgcgagacaccctttccgtgcttgaccagctcatggtcggtgcggtcgatggcagcatcgcatacgactccgcggttgcgttgcttggcttcacgcctgacgctctgatcggcgaggccgtcgacgccgttgtcgacaaaaatggcgaagcactgtatggcgtgattcagaaggtcgtggtcggtggtttcgatccccgtcgatttgttgaggatttgcttgcccgcgtacgcgatttgctggtgctcacgttgggtggagagcgtgcggaaagcgtgctttccgacgatgcggccgccgagaacatggatgatttgcgtcgtcaggcttccgctttgggattgtctgcgctgacgcagatggctgacacgatcaatgcgacgcttgccaatatgaccggtgcgatttcgccgcgcatgcgattggaattgcttgccgcgcgcttgttggccgggcgtgaggaagggatggctgtcgttgcgtcatcttccggtgtacctgattttgccggcgatgccggaacttccgcggctgccgaatcgtcgcgtggatccatggccggctcccgtcgccgtgcggcacgacatgccgcaggaaatgtgcgggcgcaggattctgcgcctgtgatcgataccccttccgcgcctgtgcagccgtccgtggcgccgacgaatcctgccgatgccgtcgcatccggcgtggcttccgtgcttgctgacgtgcagcaggcgatgaatgcgacgacttccgtcgcttccgctgcgcctgccgcaacttccgtaccagctcccattcatgacgatcgcacccccgaccagaagtgggatgcgctggtcgcagcccttccggaagacgtgcaacgttacgtaagccgtgaaaaagtgcctcgcgtgctactgagcggcgaccgtctgtggatcaaattcgacaaggcgctcagcaagtacgcgtttgccaaagcggtggcaaaggaatcggtggacggcaataccgaagtggtgaaaatcgtccgcgccgaagtgcataaggcgttcggaccgagcgtcacgctcgcgcctgccaaaaagctggcggacgggtccgaatcggtgccgtggagcaaactcagcccggaagagcagagcaagatcaatgcgcaactcgtgcaggaacagcttaaagcggccacgctgctgacggccaatcttggtactgctgcaggtctcgaatcctccggcaaggagccggccggcacaagcgcgaagagcgccgaagacggtggcaatgccggagatcccggcgatgaggagggccatcgagctgctgccggtggagccgaggaagtcgatccatgggcggccccgacgcaggaagtccatcatccggaacggcctgttccggatgatgacccttgggttgcatctgcacagccgatgcaaccgcaatcggtggtcgcaagcggcgtcaacgatgtgaaagcgccggaacaacatgcgaaacatgtggctgttcccgatgtcagcgataacgttgatccttgggcggcaccgatgcctgtaccgcagcaagcgccggtggacgacgatccttggggtaaccccatgcctgctccaacggaacctgaggtggctccgaagcacgccaatcaccagcatcgcgcactgcggcaggacgcggcaccgcagcaaggccagccgaatgccgatccgtggagccagcagttctccgcgccggcgcagccaatgccgcaggtcgccgcggaagatgacgaatattccatgagcgacgagtcgatcggggcgtcaaccgcgttaagcgtggacgacctgacccgactgttcgaggtgaaaaaagtcgaggatttcgggccggacgatgcaaaaaacccgcgcaacatgcagcagaagaagaatctcgacgactgatggcggtgcagtcgcaagcaaaaatgcgaaaccgagcaaaatcgacgaatcaacgcaatcgtaagcactgcataatcgcgaatcttatggaaaccaaggagaggtgaaccatggcactggcctatgacggcgccatccaacgattgatcgacgcgttcgcgcacctgcccggcatcgggccgaaaggcgcgcaacgcatcgccttctacctgctcaacgcatccgacgaggaatcacaggggctgatcgacgccatcgccgaagtcaaagagaaaatacgattctgtgacatttgcggcaacgtgtgcgaaaccagcccatgcccggtctgcgccgatccgcgtcgcgaccacagcgtgatctgcgtggtcgaagagccgaaagacgtgatgagcatcgagcgcacgcgcgaataccgcggcctgtaccacgtgctcggcggcgtcatcaacccgatggccaacgtgcagcccagcgacctcaacatcgccaaacttatcgaacggctcaaagacggcgaagtcaccgaagtgatcctcgcgctcaacccgaatgtggaaggcgaagcgaccaccagcttcctgtcgcagctgctttcgcaaaccgacattaaagtcacgcgattggcgagcggcctgccggtcggtggcgaccttgaatatgccgacgaaatcacgctcgggcgtgcgctggccgggcgtcgtgcggtctgacatcatatttgccacatccgttacattgccggcatatgctgacgattgcgcaaacgttgcgcgggcgatcatggaagacccgtgtggaacgtatgtacgaaaaaacgcgcggaggatttgcgaggatcccatatattgttccgcatgttgggcgtgcaggggcttgacaaatcggatttttcctataattgaccagcctgcttagtatgttggcgggcaacacattgaagaagattggataagttgtggctctcatcgtgcagaaatttggcggctcttccgtagccgacccagaatcgatcaagcgcgtggcccgacgcatcatcgaaacgaagaacgccggcaatgacgtggccgtggtggtctccgcaatgggagacaccaccgacgacctgatcgatcaggcgctcagcatcgactctaacccgccggcgcgcgagatggacatgctgatgaccgcaggcgagcgtatttcgatgagtttgctcgcaatggcaattcatgcggccggctctcacgcctactccttcaccggctcccaggctggtttcatgaccgacgcccagttcggtaccgcgcatatcaaggccgtgaagcctgaccgcgtgcgtcgtgcgctcgacaagggttccgtggccatcgtggccggcttccagggcgtgaatgagggtggcgacgccaccacgctcggacgaggtggatccgatacctccgcagtggctttggcagtggcgctggacgccgacgtatgcgagatttacaccgacgtcgatggcgtgttcaccgccgatccgcgcattgtgccgactgcacgccgtatccccgtcatcgactacgagtcgatgctggaaatgtcttcctgcggctccaaggtgcttgccctgcgttgcgtggaatacgcgcagcgattcgacatgccgttgcatgtgcgcagctccttctcccaccgtcgcggcacgctgatcgtgccggaaggcgtcgatccgcgcacattgccgaacatctgagatatctgagattcgcattcggcaatcgcgagacatcgcaggcaatcgcaagaaaaccaagactttacgaacaaaggtaagaacatgagcgaaaacaacaaccagtccttgggagatctgttccccgatctggggccggaagtcccgatcatttccggcgtcgcgcacgacaacaccgaatcgctggccaccgtgcgccgcgtgccgaacgagccgggcatggccgccaaggtgttcacgctgctggccgaggccggcgtgaacgtcgatatgatcgtgcaggcttccgcttccaccggcaccgccgatatttccttcaccgtgccgggttccgccgctgccaaggtgcgggatgtgttgcaggagaagcaggacgagctgggctaccagtccttcgacatcgacgccaacgtgggcaaggtggccgtggtgggcgtgggtatgaagacccactccggcttggctgccaagttcttcaacgcgctgagcgacgagggcgtgaatgtgctgatgatctccacgtccgaaatccgcatcgccgcgctggtcccgctcgagcagctgcaggacgccgtccgcgcgctgcacactgcctacggcttggatgccgagcaggtggaagccgtggtgtatggcggtactggtcgctgacgcaataccgcgcaataacaatcgaaaaaagacttgactggattgcttgaggcgtctcagccaagtcttttttattcccatatctgttttacagatatttttttcagataatctgcaaatgaaaaagcggaggattgctgaataatcaacaatcctccgcaatattatgttctgcagaaatcagatatcaccatgtgcaatcatgcatgatcatgcgtaactgcagaacatatgcagatcgttatcacttcttggtgatgtagccgagtgccttcagcatttcggcgctttccaaagcgccgccggcagcgccgcgcaaagtgttgtgagcgagccccacgaacttccaatcgaaaatggaatcctcgcgcagacggccgatggaaacacccatgccaccctcgtagtccacgtccttcttgacctgcgggcgatcgtcgtcggtcaggtactggatgaactgcttcggcgcatgcggcaatccaagctcggaagccttgctcgtgtagttgaccaggcgatcgacgagctcttccttggtcgggttcttgccgaagttgatgaacacggtggcggtgtggccgttgagcacaggcacgcgaatgcactgcgaggtgatcttcagcgggccgtcgaacggcacgatctcgcccttttcctcatcgacgcggccgaataccttcagcggttccttctcggacttctcctcttcgccggagatgaacggaatgatgttgcccaccatttccggccagtcgttgaacgtcttgcccgcgccggagatggcctgataggtgctcacgataacctcgcgcggctcgaattccttccaagcggcgagcgccggggtgtaggcctggatggagcagttcggcttgacggcgatgaagccgtgcgtggtgccgaggcgcttgcgctggtgctcgatcacctcataatgctccgggttgatctccggcacgaccatcggcacgtccggagtccaacggtgggcgctgttgttcgacacgaccggcgtttcggtcttcgcgtattcctcttcgatggtgcgaatctcagccttcggcatgttcactgcggagaacacgaaatcgacgtttttgaccacgtcttccacgtcggccacgttcttgacgaccatgttcttcacgaattccggcatcggcgtttccatcttccagcgaccgccgatggcctcttcgtaggtcttgccggcgctgtgcgcggatgcggcaagggtgaccaattcgaaccacggatggttttcgagcagcgtgacgaagcgctgtccgaccatgcccgtagctccgagaatgccgaccttaatcttttcggacataacaacctctcgcttatgctggaacggtttcgtatgatttcacgcttgaggtcgaccagccggccccaaacgacgtcgtgggcggccacatgcgttgttcaatcttacgaaatccgcggaacaagcaggttcccctatccgtatgctggtctgcccgtatgctgactcgcacgacccatgtgtgcgcgttgtcggttcctttgtgttggaatgtctgtcttttcagctgtgcttttatgcaaatccacgaataggatttatgtaaatccacgaatagaggcatcgctccttccgacttctttccaagctatatctcaacttatgttgacagagatgtgcgggaggaattgggggtacgtaagatcgctgagtttaatgttttttggaattggcggcacttcgcgtgggggaggtgcttaatacggaaagcctcgcaaatgattgcggtatctctgtggacacggcaaaaagttggctgtcgattctcggatcaagtttcatcgcttttcgtcttcgaccatatttcaaaaattacggaaagcggattactaaagcgtcaaagctttatttttacgatactggacttgcggcgcatttgcttggcattgaatctactgaacagttaatcttaagcaatcataggggaaacttatttgaaaatttggtggtaacggaaatcatcaaacgttatgaagcgttggagaaacgtccgaggctgtatcactggcgagatagcaatcgcaaggaaatcgatctcatcatagaaaaaggcgggaagccatactatttgatagagattaaatcatctgcgacgttccgtccagaggcgttttccacgattgatagtattgcgccggaaatgggtgtgccctgtgagcgacgttttgtggtgtatggcggatccgacagttttgggaataggcacggtcgcgtaataggatttcggaatcttggagagctggtcgaataacgggtcgtgcaatttcgtaatgcatgacttgaaaacggcggaatcttcaaggaaagatggcatgctgcagatattggcgtgatatcaacttgctgttgttctgcgaagcgccgtcaccaaatgattcaattacgattccgcagggtgattagcctacgcggcagatcgtctgcacaacttgcgttttgcggtcttttcgcgagttgtgcagacgggaaatacgggttgtgcagccgtagaattcaaaatcaaatcggggatcataaccatctcacttttatggcaattgttaagatcgatatcgtcatcaagttttctggatggatttctctgcgcattcaattgactgcggatgcattggtgttttggttgacatcttgcgcgtgtcgttattgtcttttttatattttcatgagcgatcggattgtcgttcgtatgattatgaaaaatacgtatgataacggtttcaaataagaaaactactgaaattacttatatttacagttattgagaaaaacgatttcgtcgtattatgaaggtacatgattcattgaacgtggatgttttgaatcatgtagttcaaaggagaatagatatgagtcaccgaaataaagcgttagttgctattgtggccggtactgcgctactaattagtagcggcgcggcaatagggcaggcggcgatagcggatgagcgtagtggcaaagcgatgcaaacattgaacgtcgactttgctacggagactggaaattttcgaggcggagcttcgggaacgttgtatggattgggcgatgatggttctcctgcggatgccattcttgatggagctcaggtggagaattcatcgcagaagcctccgagtggtactcagcatcctagtggtgatgctcttgcgttggagaaccaattcttttcgaatggaggcaatgaacttgctgtttatatgcaggattattatcccgattggagctataacagtggcaatcgtccatccgatagtcggacttacgtactcgatgtccctgtagacgacccatcgtatggcacttacactaacgggggagatggagtatgggactacgaacaggttacggaaattgtaatcaataaggtcctcgctaacactgagcatcctgaccaatacacctttattcctttcaatgagcctgacggcgggaattggtatgcgtcaggcgacaacgccagtgccaagattttcaggacttttctttcggattgggactccgaatataagcttattcagaagatctggcaacagtacaagaatggtgaaaagcctagtaaggtcaagccaactgctgatcatgcgcgtgtggcaggtccgggtgattgtgtgtaccggcagaataggagcagtgccttcttatctcatgctaagagccaaaatactcttcctgatgtttttgtgtggcatgaactcggtaaggaaagtctttcttccttccgcagtcattatgaaagctataggaaactggaaaagaagtatggaattaatcctattgacgtgaacatcacggaatacggcgagctgcgtgatatgagcgttccggggcagctgattcaatggcagtccatgtttgaagatgagaaggtgcaggctgagacggcatattggaattatgcaggcaacctgtccgacaacatggctcgagccaattccgctaacgcagggtggtggcagttcaaatggtatggtgatttgcgtggggctcagacagtaaaagtgtcttctgattacatgaataaggccgacagccttcagggaattgccgctattgaccgcactaataagaaagcgacggtgctgtatggaggggctaacgatgctaatgccgatcaagttaagaacgacggttccaacattccggtaactgtacatttgacgggattggatcagaatctgttcggcagcacagttgatgtcgaagttagagagaatgcctttactggcccagatggtgttgcagctactcctagagtggtcaatgcgctatccgatgtagatatttcttccggcactttagatgtgaccacaacaagtgttgatcgatatgcctcatatcagctgattgtgactcctcatcaggatcgtgttctttccattgacaatgctgctgcaggtcgtgctctgttggtggaagaggtagaaaataccgtactatcaggaggcgcccagacttacattaagactccgtggggagatggctggaactattttatgacatcgggcaatggtgatgttggaagtttcaagacgggctcgattgcttcttggacggtggatgttccggcggatgggatatatcgtttccaggtgatcagtggtaatactggatttccgggggataatgacgtgtctgttgatggacagtctgctgggactatacactttggcgctgaactggcgatgaagccggcggcaaaatggttgtatcgaggaagcggtgaggtgctactgcgactcaagcaagggcagcatcaaatccaacttcatggatcatcgatggacaacacactggataagttcttgctttatcaagtatcggcttccgataattccttggatcgaatcgaatatcctgcggatcaattccgtctggaaagtggtgctctgctgacctatgaccaagatggagccagaggattcgcctcgttgaatggaggcgaagcgaagcttttcgcccatgcttgggaaagtgggtatcactcagtgaaagttgtctacactgcatctcggggtgattccatggtgctttcggtgaatggtacatcggtcaccacaattactgctgaatctgacggtttgcagtcttccatggtgaacgttgccctatctgaaggaattaataagctggaattatcaggtgatgctgtttcgattcgtgatatcaccacatgccgtgatgctgcggatgatagcaatgccatcacattggaagccgagtcgttgcagcttgcaggaggtgcgcaaactcgggagaacagtgcatctaatgcttctggatattcgtatgtgaccggtctcggcaagcaattcgtcactgaagagagcggtgccttcggcatgggggatcaaacccgcgtggttactttggatacgaataatacgccgaagatagctgacgctgtgaggggaactgtaacgattccagcgggaaccattcctgcgggaaagtttaatatggttgtacgcttctcgaacgatgcattcattggtaagcatgattacaatccgcagattgtcgatttgggattgcaggtgcgtgatggaactgccaatggtgaggaagtagcgcgaggtgcgttccggtatacctattctgatagtaacttcctagagcgggcgatgactgttgaaaccagtggcagtgctttggttctggggaactgggatgagcctggtgtcggcgctggagcggtatcgtggggcgttggtcctaatcttgactatgtgcagttttatccagtgatggtaggagatgtgtaccaccagtctcttgcgtaatgcgagatgatatggattgaccctcgggagtgatttcctgagggtcaatttataataaaaacggtatcagagtgccttagatactactaatgaagactataggtattgtaaaaacgttggaataaagccattttgtgtatatataaattgtgtctgtgaattctggctataagttgacgtgaaaacgttatcgcgctatagtgaacttatcgacataaaagttcgtagttggtaaagaggccgtatctgctgcgaattgcgaatccgatcgcctgaagttccagtggcatagctgggaggagtgaggtgatctacatttatgggaggtacgtcgtggtgcaggacttttcttggaaaactggtgctgtcacgctttactttgaggttgatgcggcagatcacgttgtgatgaaaagtgtgcggtcgggtgaagtgagtcgtgattttgctcgtccgttaccgctggctgagatcatgtttgctggtactggacactggattgcttgcgatcgtttgattcacactactgttggaaaggaactccggttcgtttcatatgaggaaacagtggtggataaactccaccggttgaatgtgaatatgaaagatgaggagtcttgcgcgtgtgtgcagatgacatatgaaattgtggagggaacatcagtcattcgctcatatgtaagcatcaccaatgaaggcgtatccccgcttgttctcgaatctgtgaccagtttggtgcttcctatgggatctgtgcatagtaacgcatcttggactcacgagtgggtgttgacggaaggtcattttgattggctgggtgaaggacgttggcaagagcgaaagcttgatgactttttcccaatgctccaacaggagatgacgggccatgatccccgtggtgagcatgccgttgtgtcgactggtgcatggtctaccggcagtatggcaccattggcgttccttgaaaacaaagatgccggagctgtatgggctttccaggttgaacataacggagcttggcgctgggaagtgggcaataatacagtagatggctactttgcagtatccggacccactaatataaaccacgcgtggacaaagaagttggatccgaatgaatgcttcaccacagttcctgcttcttttgtgctggcctcaactcaacaggaagcgattgcgaatcttacgcaatataggagggcttgccgtcgagtcgatagtacgacgacgcagccgcgcattatcttcaacgattacatgaataccatcaacggagatcccaccacggagaagctgttgccgctgatttccggtgctgcggaagttggctgtgaaatttttgtcgtagattgtggatggtatgacgattctggagactggtggccaagtgttggtgaatggctcccttcgaagacgagatttcctggttccaaaggcatcgtggaagttatggatgccattaaagatgctggtatgattccagggctttggctagagccagaagttattggcgtcaaatcgccggtcgctcaaaagcttccagattctgctttcttccaacgtaatgggcatcgcgttgtggagcaggaacgatatattcttgatttgcgcgatggtagtgcccgaaagcatttggatgatgtgattgacaggcttgtcaacgattatggcatcggttatttcaagatggattacaatgtttctcctggcagcggaacggattaccaggccgattcagttggtgacggcatgcttgaacataacagggcctatctagattggatcgatggtatacatagaagatatccccatgtaattcttgagaattgttcttctggagggatgcgagaggactatgcacaaacgtcccgattccaggtgcagtccacgtccgatcaacaggattatcggttgtatccagctattgcggcaaccgctccggtgatggtggcgccagaacaggccgcaagctgggcttatcctcagtcgtcaatgaatgcggagcaaaccgcgttcaatatcaacacaacactgttgggtcgcttcttcctatcgggatatatcaatcgtatggataagtcgcagaaagcaattctgcggcacggtattcaggcataccgacgtttcgttcagccagttattgaacagtcggtgcctttctggccattgggaatgcctatgtggaatgattcggtgattgcgttgggattgcgcgatgattcgcagtctctgatcacggtatggggcaggaacgtcaatgaagcgcaatcgatagcgaagctacatgtaccgcagtatcaatatcaggatatctgtgtaaagcccattttcccggtgacggatgaattcactccgtggagcacggaatggaattctgagcaggctgtattaacggtgcgtattcctccacatgaatacgtttctagaacttttcaacttacaggggaaggcggtgaaacaacttatacacactgttgactgcagaagttgaataagaaaacgcgacaaataaaaacatataaggaattaataagaaaggtgatatcaatgaagatgttcacaaagtctcgtctgatggcggtgattgcaacgagtgcagcactttccatggctcttgccggctgctcgaatcctactgctgatagcagcagtgaatcggacacgggagcacaggattactggcctactgctacacaaaagcttgatggcgttgaactcacgatgtgggtggcgcagaattctaacaagattccagtcaaggttgtcagtgatttcgagaaggctactggcgctactgtcaaactggaaactattccggatccgtatgagcagaatgtgcagactaaaaccacgacgggggatactccagatttggctttctggcagccaacacagtccatgcttgcgggcttcatagcccaagacaaactgcagaagctggacaatgctccatgggtagataattacactgacggcatcgccgatgcaggtggcgtagtagatggtacgcgatatgcggcattagtttccactccgccagtgatgggtgtgttctataacaagaaagtctttgagaaggcgggaatcacagatattcccaagggttgggatggatacgttgaggcagccaagaaaatcaaggatgccgatatcgatggagtggaatctccactgtttgaaatgggtggctcccagtggggaacccagtactcagtgcagattcagctggctgaagctgctcaagatggtctgtgggatcgtgtgaattccggcaaggagaagttcactgatgatactatccagacggccatcagcaactacaagtctctgttcgatgaaggcctctacaacaaaaacgctggttccgccaaggataccgatgaagctcaggctctgtgggatggtaagaccggcatgattatctgcgtgaattcgctgtttaatcaaattgccgccctagcaagtaatgacaaggcagcgctggatgaaaccatcggattcttcccgctctcgtccgagggcaatattggtacggtgattccggaacagaataattctgttgttgcttttaagactggtgactccaagaaagaagccgcagctcgtcagttcattaactattggatgaccgaagattacgccactttcgtcaaagatcaaggtattgtgtccgttatcaagggtgtggatactcctgacaacgttcctcaggcactgctcgactccgctgattccattaaggattctgtcggttccatgcagtccttggctgtggccaatccggatctgtacatcaacttggccgacatgatcaacggtacgaagagtcctgaagacgttgccaaggcaacgcaggatcagttcgctcaactggccaaagctcaaggtgttcagggcttctgaacataaatagtggaacaagatatctgattgactgggcgtcgtaaaacaggtaataacggcgcccagcctccaaacaaaaagataagcgtaggggaacaatgtcaacacaatctgcggcacgagtagtgccaaacgcagaaaaagaaggaggaagcaagagcaagaaagcgctaatgcgtcagaactatccgattcgataccttctgcctgcctatatcatgctcctcatcttcttttttgtcccaacaatccttaatctaatctatgcctttactaattggtcggcatattctaaaacaattaatttcgtaggtttcagtaacttcatagagctttttaaatcaggcaacctgttgcgagacttgcgcattacgttaatctatgcgttgctggtcgcaatattccaaaatactttcggactattgttggctgtctttcttgaggaagatacgcgaatcaatagatttgctcgtacgatgttcttcattccggtcatcatgtcggcactcgctgtaggctacatttggcaagcagtacttaagtctgatggcgcattgaaccagattctgtcgtttatcactggacagaatattgacatagcttggcttggatctacaacttggacaatcgttgttgtggcagccattcacggctggaagtggatgggactatcgatgctcatcttcttggctggtctaaaaaccatcgattctgatgtgattgaagcggctgcaatagatggtgctaataggcgtcaaacattctggcgtattaagtttccgctgttggccccagcctttactttcaacgtggcgacatctctgctgggctctatgaatggcttcgacatcgtccaagcgacgactcaaggtggccctggaagtaccactgaaatcatcaacctcttcatttggcgaacctttggccaaggactatattcgcagtccacaacgatgagccttgtgctattcatcatggtcatgatcattgcagtgccgttgatctggtacctgcgtagaagggaagcgaagatcctatgacatctgcaacgtacggtgctgcacctaagaccaacgattcggtcatggtgaataagccatcaaaagttcatggaattattcatgggattctagtggtcattgttatggctgttttgttgggaattccgttctggttgctagtagttactgcaggtaagacgcaggctgaagccatagtgcctaacatgagtttgccaagtaagtggcatcttcttgagaatttcaagacggtgctagtagatggtaaaatgatttccgcattcttcggatctattgtggttacggttccatctgtgttcttggctctgttgtttggatccatggcatcgtggattcttgcacgtcgcacaacgaagactctggctgtggtgtatgccttgggtatctccggtttgattcttcctccggctgtggttactgtcatgatgctgttgaagattatcggtctttcaggaactgcggttggcatggtcggtgtatacatcggcatatacatgtcaacggtaatcttctttgttaccggattcattcgaacaatcccgatctccttggaagaagcggctcgtgtggatggtgctaagccgatgcgtatctttttcacgatcattctcccactgcttgggccgacactagctactgcaacgattcttgtgacactgtatatctggaatgatgtgttctactcattgttcattttgtccggaaagatggatttgctgccgttgaacttgtacaacgtggcaagtgctggactttatctgaataactggcaccttattttcgcatacatcattttgatgagtgctccattgctaattatctttgcgtttacgcagcgaaagattattagcggcattactggaggtgctgtgaagtaattgatactactatccggatgcagtggactgtaaggggttggcatccggatagttcttcgtttttctgaagaaatagatggtttgttccgggtgatttagggaataggattgtattttatatcacttcccgagagagaagtacgcaatcatacgaagaggtgaacaatggccaggagtaggcagacgaaagctgcttcgattaaggacgttgctgcgctagcgcaagtatcggttcctacggtatctcgataccttaatgatagggaacgagtaagcgctgagaaacgggaaaagatcgctaaggccatcgatatgttagggtatcgtccgaatccgatcgcacgtgccttagtgaaagaccagaccaaagcaattgctgttttgtctacaaacaccactttgtatggtcaatcgcattgcattgagggaatcgaagagaaagcgcgattagcaggctattcgctcacgattggtattcttgctgactccagcagaaataagcttagatccagcgtgcggtcatgtcttgatcagaaccccgctggcgtgattctgttgaatttcgatcaggtcggtaatgatgcttttgcatatcttccgccagaattacctgtggtgatgatcgctggcgatcgggaagaggaaattgctcagatttcattgtgcgagcgagagagtggctatgaggtgaccaaatatttgctttcgcttgggcataaaaccgtataccatgttgccattccagggggtggcggcggctatacgcgattaaacggatggagacaagcatgcgaggaagtgggagttcctgcgccggctcccattgaggctgattggaatcccgaaactggtcgtcaaattggtcaaaagctggggcgggactttaatgtaacagctgtctttgcgggcaatgatgagctggcgatgggtataatccgcggtcttaacgatgttggtcgaagagttcccgaagacgtcagcgtagtgggattcgatgatcatcctatctccaagatttggaatccgggattaacgactattcgccaggatttccgttcagtgggcatgaaggctgttgatcttttgaaggacaagatcgacgatcttgctgagggacgtggacatacagaaaattggactcgatatgttgagattcctggccaactagttgtgcgagaatcgaccatggcagtctgattaatttgggtgtaaccaagtagcagaagtggcatatttaattgccgtctgcacatcccgcgttccgtgtctgcacatcccgcgttccgtgtctgcacatctgaataaaacgaccagaaaatacggatgtgcagacggcttcattccatcaaacacccccgattgctggttttccaagattcagataccccctaatcaaatatcctgtctgcataatccgcaatttccgtctgcatatcccgaagatttcagccctatcgcaagttgtgcagacagtctcaatcgcatgttgcgtgtaaacgaaaagtcacgactttgtattgtcggtattgccagtattgtcgtctttcgcccagttgaaggcgattacggcgatcgcggcaatattgagtacattactgatgatttcgatagggcttccggtgcgcgtgagcgctccgcccaaagtgtgaagccgcctcacgatcttgaaatttcgacctcacgattctgctttttctgcataatccgaaatcgtgcgctcgccaacggcgcacaaatacccccgaacaagtctttttggaataaaaacatccatcattcgagacaaacggcccctatgacctcacgatcttaatctgacgaacaaactgccagacccgggaatctcacggaaaccgaaatgctggtagaaacttcgcgaagcatcatcatacggatcgacgacaagcgcacgggaaccaatttgccggctcaccgcaagagatctcttcacagcatcctgcagcaacatccagcccaagccccgcttctgaaagcgggaatccacgcccagcattcccaatagaatcgcgggaatttttgcagggacatttcgccgaagccaccctccccgcacggtctcgcgatcgatcgaataggcgcttatcgcataaaagcctgcgacatccccgtctgtggtgaagcatacgtacggaaccgcggttccttgctttgccgcgtaagacgcatgtttcgcagcccaatcgtcgatgagctcaacactgcaagagaacgagccgagttcttcacccggttgcagtcgtcggggttcaagaaaacgtgccgcagccgcgccagtgccatcaacaccactcatgcccattgaggttccctctgcatgagctcagccatttcggcgggaacaggctcatcaagcgcgcgcaaaaacgcgtcaaacgcttcattttcgagcttcagcgacgaagcctcttcgatttccctctgcgcggcttccagcaaatgctgcgcggtccactgcgtcaatgtggagccctttagcgaaacggcgcgttcgatcaacgcgcgctgttccgcagtcagccgaatatccaagcgcgatgttctattgccaaatgttgtagccatattgatagtgtacggcattttgccacacaaaacaactgtcaggtgcacaatcagattgtttcagactggggtatcggcttgaacgcgctggcggaaccgggaatctcacggaaaccgaaatgaagcgccttatacattggcttttcggggaatatgcgcctccataacccaccagcacatctcattttcctcttgaacgccggcaagcaattcacctccatgttccacaagctggttgcggaagcgagaaagaccagtgccatccaaaaccgcggaaggtttggcggcaatggcattgcgcagcctgaccgcatactcgtcacacgaaacttcaattgtaagaacgtatgcaaaatgagcgtcggcatacttggcaatattcgaaaaagttccctcgccaatcctagaagaagatgctcagtgacgacatcatcgctgccgggaatcatctctggcagcaacactattccgtcgagaccaagcgcggtcagatttgcctgtttttcgctcacggtctgccgtaattcattaagcatgatctcaccagaaacggcggccgaagaacgttttggaactgtggcgtacgatatcgcgtcgtgcggcggcttttcggaaaattgcgtaggttcaagtcgcgcaataagctcatgcgaacgcgccgaagcatcatcgaagcactgcatcgcgtctgcaatgcgagtgaaatcgccttcttgcgcctgcccaagcagcaatgaagcatcggttatatcgttggaaatataatcatgcagggcatgtgcaatctcaagattctcacgctgccgctgaagcaggccatgcaattccgcctgagcctgactttgccgaataaaaccgccgatcagcgcagccaaaaccagcaacgcaaccatgtacaacaattcctgtgaagaaataacattcgcggaaacagttttcctgtcatccattgcaggcaatagccagctcattcccgccaccacagcggcagccgccaaacttttgcccaagatgacaataaccaagcgccccaatcgccatcatgcatgacatcatgtattcctccggcagaggattccacaaatcgcaggggaatagcgaaacgtaccaaatggcaagaattatccaactgccgcatcgaggcagaaaagcaataatatcaagtggaatcagcgaaataattatcagaaaaatatttatgagattcatgctgacattcgcttggagaagcaaatcagctagtgcacagcaatgcattatcaaacaagttgcgataagaattaagagatattttcgattgcggatgattttcagtgcactgtcgaccatggcagcactttctgaattttacctattttattcttgaataagatgatgttgcgggcaaaagcgtatagcttcgatccgcttgctcacacctaattttttcgaagcatgatgaacatgagaaagcgctgttccgcacgaaatattgagatattttccgatttcttcagtagttaatccttttgtatacatagaaagtatgttgagttctcgcttggaaataatccgttcgtctttttcggaaacgatgcgaagatgctcataagattctctcgctgaaagaaaatcgcccgggcaatcggcgcgttttcccgaagccacctcccgaatagcttttgcaaaagccggtgagaagatatcccgcctggagaacaacccttgagccccggcggaagcaagctgctgacgatattggtccagcggatacgagttcacgccgacaatacccaacgatgcattgcggcacctgatttgccggtacacatcgacgccggaaataccgttcaacgcaagattcataacaagaacattggcttttgacagcgagtccgcactttgttcgaacgtcacccgttccagcgtgcgttgcgccgtcatgccagtccaaacaacatgcatcgagctgccggaccgttgcagcagaagccgcatcatctccaacgcgcatgcgtcattatcaagaatccccacattgacgccatcgtcgcagttcttcggaaccatacccccataataacgctccgaaccacctcagcctccggactccattttttctgtaatcgcacttgattctttgcttcgcgaagcacgaacttgagctacgccgcgatggagcgcaagtgctgacgcaggctatatcaggtggcgtggttcaagtaagggggttgaagatgattcggcagacagttcagtggatcgtgtatttcgttaccgtcgcggcactcatctgcggattggagatcgtaaccggacttcccgcgcaaacgcaggcctcgctgccattggggacgcatctgtggattgcgctgtggtgcgttttgggactgatggtcatcgcattcgtgcgactttcgcgcagctacccgccgctgttcattatctgcactaccaccatttgcgcgctggattggctcgtgttgggattgaaatattcgcacatcaccattgccggtcttctctcggcatccaatgtcgaaatcatcagcaatgtgctcaatattgccgcgatcgccgtaatcgccttcagctgggcgaaagatgacgatacgggcaatactgacaatacaaagttgtgaccgcctactacgcaacccgtggtttcgtattgcacaagtcgcgaaaagaccgcaaatcgcgagttgtgcagacggagcttcaagattgtgcgacgaaatcacggaatcgtgaggtcgattcaaagatcgtgaggcggcttcatactttggacggagcgctcgcgtacactggtagacatgtcgaaggcatcagaagaagcgcagaagcaattggaccgtatcgtggcgttgggatatccggatgtggccgatatgtcggccgccgcgttccgtgctttggcacgcccgctcatccgcgcgctggaggattccgatttgggtacgcagattctgttggtgcctacgcgcgagttggtttccccggaatcgttgatcgcgcgtacgtcgatcaatcgcatggctggtttcaccacgatgccgccacgcgatatcgccagtttccttccgcaggatggtttcgaacctccggaaggtccgttttacctggtggtcgaaccgcataccggcacctgctacatcaatcgcgaacccgatgtggcgcgcaagttgatcgattccgacgagcgtttgccgcttacgttggaagagggacttgctattgctacgcagcatccggagtggttgttggagaagaacggtttcaatttgttgggatcgcgttccgcggatggtcgcgtcccaagtatttggatgagccagaacgcgccacgattgggtgcggtatggccgaattcccgtcatacttggcttggcaacgcgttttgcgtgtctcgtcgcggcgtcagtttgttccactgacgttctgctgatatttcgcagattttccacagattttccgcattccacagattggcgattatccgactgttgcgacggccacgccttgcgtcgccgcacctagcgcttgaatagtttggcgatggcgtggccggctgcggcgcacattaccgatccgatgcccagcagtgtggcggtgacctgcgggcggcgcaattcgttgcggatgccgatcagatcggtcatgcaatggtcttcgaagaacacgcgcaattcgttgctggagtagcgcccgatcaagtcgccccacgtgagcatgcgcgtcacgtagctgaccggattgttttcgcggaattcgaacagccggatgcctcgcagccgcgatttcgggccgtagcattcaaaaccacaggtcggcgcgtaccccaaatcgatgtcgtgcacatgcccgacgaacgaattcttgtggtcatgcccgcagaacagcgcgaaatagccgcccgcatcgcgcaatgcctgcacttcgccaacgttctcatccgcacagccgatcgcctcgccaagcctcgagccaggtctgcacacgtcacgattcaacacatagcaatgtcccgcgaacgttcgcgcaccctccaccgcattcggcgtgtatgcgggcacttcgcgcaggcaatcgtagaactcctgcggcggaatatgctggaacgcgatcgccggaaccgccaaaccgtcgccattgcgctcgcccaactcgcgttgcacttgcttcagccattcgatcgcttccggcgaaggcgtgccatagccgtcggaatcggccaaatcccatccgcgcgaattcgacgcgtattttgcgtaggatgtcagcgattcccgtcctcctgcagcatttccagtatttccggaagtatcgccagatttgccagcatttccagtatctccagcatgctcgcgatcgccggaattactgcgatcgccgtcaaacgcattatccgcataatcgccggaattcaccatcatcacgctcatcgcaatgcgcccagacccgtcggaagcctcgatcggaatcgcaaacgtgcctggttcgagagccaaaggagacgacccggcaacgggattcatgcaaccggaaaactctcggtagaggtcatcctgttcgtcggcgagaatgccgcactggaaatcgtggttgccgtaggttgcggcaaaggggattcgcgcttccaatgcaggtccaaggaatgctgcgaacgtgtctcgtactttctgccgcgtgctgtcgagtatggtcgcggcggtcgcgcgattgatggattgcgcccatgattcaagcttgttggcggatccgttgcgcccgtcgcgtttgttgcgtttcacgagtttcggcgagtcggtgccgatgccgtcgatcatccaattgtcgtcggtcgggggctgttcgagcaacgctttggtgaagggatgtcgtttgatgccgcggattttcgcttcgatttcggtgaccgcgcgtatgtgcgtgcccggctgctctccgcgacggcgcaggaacgtgtcgatgtacgcggggtcgtatccgcgaatctggtcgccggtgaagacgatcagatcgggatgcgttttcttgatggcggcttcgatgagacggatcgtgtcttcgcgcacgtttggtccgtcctgaatatcggccatctgcagcacacggaaggtgccgtcgctgttgaatcgcaaggtcatgatgctcactgtaatgcggcaaatttggatatgaggtgaaaaagagacgaaaatcgtggtctgtccgtcatatggcggaatgccggcgatatatgggattggttgccgctactatgggcggcagtgcaggtaggtaacatgcacgtaacaatgtgggccggcagaaggcctgcccagctttacagataaggaggagtgatgggtcaggatcaatcttcagtgtttgatctcgcggcagtggctgcagcgtccaacggagggaacaacgacccgctgctgcctccggcgcgttatattggagctccgcaaaagcccagcaagatgccgtacaacaagtacgtcgcatacgataagcaggtgccgtttgattacccggagcgtacgtggccgggcaagcgactgcagcgtgcaccgcgttggtgttccgtcgatcttcgtgacggcaaccaggccctcgtcaacccgatggattccgagcgcaagctgcgtttctggaatctgctggtgtcgttgggcttcaaggagatcgaggtcggcttcccgtcggcttccgaaaccgattacgatttcattcgtatgctgatcgagcgtgagctcattcctgacgatgttacgatcgtggtgctgacgcaggctcgcgagcacctgattcgcaagacttacgagtgcctgaagggtgccaagcgcgccgtcgtgcacttctataactccgtgtccgtgctgcagcgtgaggtcgtgttccgcaaggataaagccggcatcaagaagctcgccaccgacgcggccaccctgtgcaaggagcttgagggcgaagcccagggcatcgacctgtattacgagtattctccggaatccttcaccggcaccgagccggagtacgccgttgaggtgtgcaatgcggtgatcgacgtcatcaagccgactccggagcatccgatgatcatcaatctgccggcaacggtggaaatgaccactccgaacgtgttcgccgatcaggtggaatacgtgtcgaacaatctggtgccgcgcgacgccgtggtgctgtcgctgcacccgcacaacgatgagggcatgggcgtggccgccaccgagctggccgtgcttgccggtgccgatcgtgtcgaaggctgcctgctgggcaacggcgagcgcaccggcaacgtcgatctggtcacgcttggtctgaacttcctcacgcagggcatcgatccgcagatcgattattccaacgttcctgagattcgcaagacggttgagtactgcaaccagctgaagatttccgagcgtcacccgtatgccggcaatttcgtgttcaccgccttctccggttctcaccaggatgccatcaagaagggtcttgaggctcgtcaggtggccgccgatcgtgccggtgccgatttggacagcttcgtgtggctggtgccgtacctgccgatcgatccgaaggatatcggccgcacgtacgaggccatcatccgcgtgaactcccagtccggcaagggcggcatggcctacctgctgaagaccaaccacaatcttgatctgccgaagcgcctgcaagtcgagttcgacaaggttgtgcaggcgtacgccgatgagaccaagaaggaagtcaaggacgaggatatttggcgtctgttcaaggacgagtatctgccggtcgaagagtccggcgctactgcggctggtgccgtggtcggcgacagcaaggacgactccctcgagcagtggggccgtctgaagctgctgaaggtgtcggtgtcgtccggtgaagatggttccgataccgtgctgaaggccaggattcttgaccgtggcgtgaacgtcggcgttgatgagccggtggagcgtgaggtttccggcatgggcaacggcccgcttgccgctttcctgaacgcgctgagcaacttcggcatcgaggcttccgtgatggattacgtggagcacaccatgtccgtcggcaccgacgccatggccgcctcctacgtggaatgccagatcggtgaggaagaggatccgcggatcgtgtggggcgtcggcattgacacgtccatcgtcaccagctcgctgaaggccattatttcggccatcaaccgttccgagcgctgatttccgcgggttttcggttctcgtagctgaagggcttgtgatgtacttgcgagtacgtcacaagccctttgctttttgatttcataggattcccgagtttccggattttccagtttttccggattattcggaaactcggaaattcaggattgcgatccccaaatgcagacattgttgccgattgcggagaacgtcatgaccggcttgccgtcgatctcgcgggggagtgttgcgaaccgtgcaatgtaggtcacgtcgtccaatcggatttccgcgtcgcttgcgcaacagttgaatccgttcacggcgccggaaagcggtttccacgatccgcaggtgatcggcccgtccgtcgacctcggcagattcgcgtcgggagtatcgaagaaacttacgatttcaccccgggtgatccgcccgtcctcatggaacgtatatcgcgtcggacgattgatgccaacgtacgtgccatcatcctcttgcttgccgttgaagaacgtatgctgatcatgcagtacaacgttgtaatcgcctgtgatatcggcaatgccggtcggcgcgacggcaacggaaccgcggtattcgtatggtgccgcaaccagccagccgtcggaagtcggcagtaattcgcgtacgtgagattcgtaatcttcatcatcgccctcgctaaagcgttccgcgaaacgggtgtggtagacgaggaacatgcggccgtccttcgaccgacgaatggcggaattatgcccctgcgagacttcgacatcggcaagttctgccggaccgccatcccactgtacggaagacgtcaatcgaatgccggtgccgcgctcctgattgtcgggaatctcaccgtacgaaatcgcgggattgccgttctggtccacgtatgggccaagcagcgattttgaacggaacagacgaatctgatatccgccggtgcgcccaagccagccgtacgacatgaacagataccaccatccgttttcacgaatgaagtacgatccttcgccggaattccagtagcctccggccactttcacgccgtaataaggatcggaggaatccttgaccagtgggtatcgcacggaataatcgcgcaagccggttttcggatcgagcttgaacatccagatgccgccgaaccatgaaccgaaactcatccacatttcgccgtgttcgcacaatgcgggcgccgcgtcgatggcgttgatgcgcgtgtctttgagcgacaggtagcgggtcaggtcatatccgacggtgccatcggttttgggctcaagttccagcactttcggcacgtcggtgttccacaggttgctctcgtcgaaaccggaatataccaccggccccacgtacgtccagtcgccgtccacatggtcggcggtcaacagcacgatcaccgagcggaactggtcgccgttcaccgacaggtacatgcaccacttgcccatggtctcgttccagatcacgtcgggcgcccacgtgttgccgagcaggtcgggattggaatcctgtttcggccatgcctgccaaatatcgccgagcagcgcgtacgggtcgcggctcagattgttatcgaaccgctcccaatgcaccatatccgtgctgcgcgcgcaccgacgatgcgtgccgaacagatagtagacaccgttttcctcgacgattgcgggatcgtgcacggccacccgaccgttggcgagcgtgtgctcgatgccgttgggcgagatggcctgcgatgcggggcctgcattgcttgcgttgactgcgccggttgcgtcggctgtggaatgcacggttgttgcgccgtttttgctcacttctgagacccccaaacgcactcgtttgcgccgattgcggagaatgtcatgacggatttgagatcattgtctcgcggaagcagcgcgaagtcgccttcataggtaacgccatccaaggtgatttccacttgattggtgccttctttgacctgccatgtgccagttttatctccgctgacagtgccgccttgttccagcttgatggtggctggtgtgttcacgcccttgtaatcggtgctgtctttctttgtggcatcttgcaatccttggaagaaggtggtcgggtcatgttcaacgagttcgtattcgccggtgagcttgctttcttcatatcccttggtgtcggccttggctccgacatattcgtacggtgctgcggtcagccagccgtctgacgtggccagcaattcgcgaacgcgtatctcatgttcctctcctcggttggagaagcgagtgtgatagaccacgtatgcagtgccgtcctcgtccacgaatgcagagttgtgcccctgtgcaacctcgatgttggtgttgtcgttgccgctccattccacggatgccatgagacgtatgccggttttgccaagccagttgctgccgatggttgtggtggagattgcggtgttgccatcttcgtccacatatggaccggtgatgtctttggaacggaattcgcggatttggtagccgccggtttgctgcagtgcggcataggagacgaacaagtaccagtaatcgccttgtttcatgatgtaggagccttcgccggagttgccatggccgccggcgattttgatgccgtagtactggtcggtttggtctttaacggtttcgtaagtggtgctgtagtcgcgcaggccattggaagcgtcaagtttgagcatccacagtccgccgaaccaggatccgaaagtcatccacagatcgccgttgtcgtcatacttcacgcaggggtcgatggcgttgatttcagtatcgccgggggagaggtagcgtgtgggtacttcattggaatcgagcacttgcggtacgtcggttttgctgacggtgtcatctcggaatccggagtagaccacaggacctacgagcgtccagtcgccttcgatgtcatctgcggtgagcagcacaatcgccgacttgtagttgatgccgtttaccgacatgtacatgcaccatttcttcatggctttgttgtagatcacgtcgggtgcccacatattgccggtcagatcagagttggctggctgcttgggccactcttcccaaaagtctcccagaatatctttgaactgagtgctgagattattggtgaacggttcccaattgactaagtcatcgcttttgagccatgcgcgatgcgagccgaaaatgtagtatttgccgttcgcttcgacgatggatgggtcgtgtgaggatccgcgttcaatgtcggagacgcttttgaccacagcttgtgacgagccgcctagtgctgagcatcctgccgcggggccaagtagcatggcgcaaccggcgataagcgctactgtttttcgtaatgtgcggaacatgtctttcccttctccgtgatgttctgtactgcggtgtagtgacgtgcacgatttgtacaacgttgtaacatgcgatatagtacatcgttgtaaatcagaagtctaattacatgaaggggcgtctaatgaagggcacctactcgttgctgtgctacacgcgcgaagccaccggtcgcgaagaggcgaataacgaagatattgcctacagcatgcatctggcgttgcgtgcgggcgaaaccgctgaatgggagccgttgaacgagaattacggtattttcttcgccgccggcgtgcctattcaggccgccaccgccgagtcgcgccgagcgtgcgtcgcggcggcgcatttcgtcgccgatccgttcgatgaggcgcgtccggccactgatgccgtcgcatatggcgcggtgatgccggggatcgacatcacgttgaaatccctgaagaacccgtatctgttccgccttgcggatggccgattcgcgctcgccgccacccgtaccgcgcgcggcggcgagccggatggctccgagcgatcggcgttcctgttggccgtcagcgacgatctgacctccttcacgcagcttgggctggtgatgctgcgtaccggcggtggcgtcaatcgtccgtctgtcgcattcgacgcggacgcctcccgttatgtgatttcctggacgtcgaacgacggcaaatcgtatgtcgcgaccgttgccgatattgtcgccgcggccgaatccggcgagccgatcgatattgcggaagctgtggtaacggcggaatcaagccgttcctgcgattgcaatattcccaatgccgttcctggcaacgtgattgccgtcactgaagaagaagcgtcgaaactgatcgaacgattcggtcgtatttacaacgttgaaacatcggtggcgacgcagcatatcgacatggcggcaagcagggaagcggcccgtgaagccgtgcaggcacttgccaaggtccgcgttgatctcgtctacagcgacggttccggtgccacccgtgccgtgaattggaacaaagacgaacttgaggcgattgcgcgggacgccgccgaaggcaagctccagccgggcgacacgcgcacggtgagcggccgcatccgccaaaccgtatacccggtgccatttgccgtggagcgtgcggacccgtcggtgttcgcttggaatttcaacggcaagccgatgttcatgttcatcgctaccgacgataccgacggcaactgcgtcgatccgaacgatggcgccacgcatatgccgttgcgcatcgccgactccatcgaagcgctttccgacgcggcgggcggccgtgccaaggaaatcgatctgctcaaatgcggtgattacaacgctgaaggacgcgccatgaccggctgcttctgggcgccggaactgcatgtcatcgatggaaaattgtcggtgctcttcatgccatgcttcgatgggccggccaccaatccagacggcacgcccaacgatcgcgcgggcaagccagacatgtggacgggcagctgccatatcatgcagctcaagcagcattccgacggcacggatttcgatccgtgcgaacccgaaaactggacggtgccgaagccgattctcacaccgaccggcggcgtgctcaatcccatccaacgtatctcgctcgacatgaccgtcatcagcgattccggccgctggtattacgcgtggcagcaggtcggcagcatttggatcgccagcttcgatccggcccgtccggaacggcttgcctgcgagccgaagcaggtcgttgtgccggaattcgcgtgggacaatatgatcgccgaaggtccgaacgccatcgtgcatgatggcacgatctacctgatttattccggctcgctggtaggcattgactacaccaccggtctggtcaccgctccggccgggcaggacgccgatctgaccgatccgaacgtgtggacgaagctcgactatccgctacagaaatccggagtatacaacgagcaatggcagctcggcaccggccatggcatgtggtccaacgacgaggacggcaatctcatctatgtatttcacaatgcggaatacgagaatggacggtatggcggccgcgacgcccaggtgcgccgcgtgcactggtccaaggagggtatgccgatactggacatgcaggcggcggaagagctcaatccggactatgctgatataacgatgaaaatcgtggtttccggcaataaaggctgattccgttggcttcagcgccgcaaggggcgaaagccggtgttggggccgaatgtatgagacgttttggtgaaaaggggttgacatgccgaagcagaatggcgccaacggcgagcacatggtgaccatgcgcgaggtcgcgaaggcggccggcgtatcgatcaaaacggtgtcgaatgtggtcaacgactacgagttcgtgtcgcaggccacgcgagacaaggtcaacaaggccatcgacgagctcggctacacgttgaacatgtccgcgcgcaatctgcgcagggggcagaccggcatcatcggcctcgccattcccgatctgcagatgccgtacttcgcgcagctttcgtcactggtcatcgaagaggccaagaagctgggcctgcgcgtgatcgtcgagccgacgcaatactcgcgcgaaggcgagatcgaggcgctgcacggctcccagcagacgatgatcgacggcctgatctacagtccattggaactcgatcaggatgatgtcgaccaattggacgtggactatccgctggtgcttgtcggcgaacgcatcttcaccgacaaggtggaccatatcgccacggaaaacgtggaaggtgccaagcgcgccacgtcgtatctgctgcagaccggttgcaagcgcgtggccgtggtcggcgtgcatccgggcgagaaggtcggctccgccgcgctgcgctatcagggctaccttgaggcgttggaagaggccggcgtcgaattcgacgagcgtttggtggtcgagtcgggcatgtggcatcgtagcgatggcgtgcgcgtgatgaacgcgctgcttgattccggcgtggttcccgacggcgtcgtcgcgctgaacgacatgctcgcctccggtgtgatgcatgcgatccagatgcacaatctgcgcattcccgaagatatttcggtgatcggtttcgataattccgacgattcgcagtatttgtctcctgcgttgacgtcgattgctcccggtcttgaggcggtggcgcgtctgtcggtgaaattgctgaaggatcgtatcgacggggtttcgccgtcgaaggatctcaagccggagcagaaggtgttccgcaaggtttcgtcgtcgttggtggtgcgtcagtccaccaagctgcctacgaattccttggtggtgtgatttttcttccttctttttcttcttcttttggaaggaaggaagtgattggtgcctcggcgcttgcgtccggttttttacggattgccggtgccgaggtttttgttttccctttctggcgattgtctgttgccgggtactgcgattcgattcttccgaggagtcggatgcgagaaacacgcggtgcgttcctccgatttgttacaacgttgtaatagtgatatattcaacgttgtaaattactggaacagcggattgaaaaggaatagacatggctgtttacaacaatccgatcgtgcttcagcgcgcagatccttgggtcctcaaagttgacggcgagtactacttcactggctccgacccggaatacaactgcatcgccattcgtcacgcatcgaatatcaacgacctgcagaaagcccccgaaacggtggtgtggcgcaagcatgaatccggccccgcgagcatctacatctgggctccggaactgcaccgcatcaacggcgcttggtacatctacttcgcaggcgccgcaacggatttcgaggcttccggactgccgacgcatcgtatgtttgtgctggagaacaccgatgacgaccccaccaccgacaactgggtggagaagggccagatcgtcactccgatcgactccttcgcactcgacgccaccaccgaggtgatcgacggcgtgcagtacctggtgtgggcccagaaagatcccgcgatcgaaggcaattccaacctgtacatcgccaagatggcaaacccgtggacgctggaaagcgagccggtcatgctcaccaagccggaatatgactgggaatgcatcgacttccttgtcaacgaaggtccggccttcctgttccacgagaacaagatctatatcacgtattccgcctccggaaccggtgtgccgtatgccgttggcctgctcaccgccgagcgcggcagtgacctgctgaacaaggattcctggaccaagagcccggtgccggtgttcaagacctgcgccgaaaacggccagtacggtcctggccacaactcgttcaccaagtccgaggacgattccgaagacctgatgatctaccattgccgcaactacacggaaatcaagggcgatccgctgttcgacccgaatcgtcatgcccgtgtcggcgtggtcaagtggacggagaacggccccgacttcggcgtgccggaacctgacaatctgtggactccggacacgacggatgtgttgccggccgacggcggcgctcttgcgggaacgccggtagcgaactgacttgcgtaatcgtaagaaacgttgcgattccaacaaaaacgaataattgaagattataaagaaaacagcttttccatcggcgtgtttccgatttgtacaacgatggaaaaagctgtataatcaaaattacaacgttgcaaacggcagtgcggctgacgaagcgtgaacgacatcgcaaacaaggttgttgatgaatgtcactgcaacggttggaggaaatgtcttgggagaccaagaagaaaaggagaaatccatgaagatcaagaagagcaccaaggctctcgcggccgcggcgtccctggccatgatggccaccgtcggcctgtccgcctgcggcggctccgacagcagcgaaaccgatgctaacggcaagccggtcatccgtattgcacttatcaagcgcagcactcagatcgaagctaaggaaatgaagctgcagaaggatcttgaggccgcctgcgattgcaccatcaagtgggatgaaatcctggatacccagtggtctcagcagtcctccaccgtgctcgcttccggtgacgttgctgacatcaccatctggggctataactccgacaacttcgcccagtacgattactgggaggatctgagcgatgatctcgatcagatgccgaacgtcaaggcatacttcaaggcagtgccgaacgctgagaagttcggttccgatatcgacggtcatgtctggcaggttccgtccgactacggcaacgcatccggcgctaagtggtccagcggccagaacctcatgatcaacaagtcctggctcgagaagctcggccttgatgttccgaagacttgggatgacctgaccaaggtcctcaccgcattcaagaacgatgacccgaacggcaacggcgaagccgacgagatcccgatgctgatcaaccagctcggcaccgcaggcttcaactggtgggatccgttcctgctgctcaacggcaccggtctgaacacccaggtgatttccaccgccggttccaagggcatctacgtcaaggacggcaagatcggcaacttcatgatcaccgacaacttccgtcaggtcattgagtactaccactccctgatcgagaagggcctcatgccgaaggatattctgacccgtgatggctcccagaacaccgccgacatctccaacgacggcaagaccgccaaggtcggtctgatcttcggctggaacaccggcaacttcggcgatctgaaggatcagtacgagtccatcgaggttccggcagctccgggcgtctcctatgaggaaaccacttgggaaccgcagttcgaagatatctacaacggcgcttgcgtcaaggctgatctggacgaagctcacaagaccgcagctctcaaggtcatcgacaagtggatcacccctgacatgtccatggaatcctactacggcgatctcgatacctacatctccaacgagggcgacggcaagtacaacgtgctcaagttccaggacgatctctccaccttcggtctggcagaccgtggtctgacttgggtgtctgacgacatgtccgtctccggcgatgaagacaaggtcctcgctgagaaggacggcaagacctacgaaacccagcagtcccacatcggcgacaaggatctcatcccggcctatgtccgtctgagcgcagaagacaacaccaccgtctccaacaacaactccaacatcttcaactacgccatgccgctgatctccacctggattcaggacggcggtctgaccgacgatgcatggaacgagtacgtcagcaccatgaagcagcaaggcgtggacgagaacgtcaagctctggcagaagtggtacgacaagaccatggctcaagagtgagcttaggtcatcccgcaaccacataattgaatatctcacataactgaatcaaataaagccctccctgcggtgagcattcttccgtgcatcacgggggagggcactctgctttttaaacacattcgcatcgattatcaagagagagggatggacatggcttcttcgcaaatcacaacatccgggtcgagcgccgacatcccggacaacgactacatcgcgcgtcacaagccgcttccgattcgtatttcggctcatctacgtcgttactggcagctgtggctcatggcattgcctgccatggttttcgtgttcatcttcgcctacattcctatgtacggcattcagcttgcgttccgtgagttcgtgccccgcaagggcttgactggcggtacgttcgttggcctgaagtacttccagaagttcttcgaatctccgcagttcgtgagcttgatgcgcaataccatcagcatcagcctttcgaccttggtgatgggctttatctgcccgatcatccttgctctgctgatcaaccagattggttccaagaagatcaagggattcgtgcagaccatcacgtacatgccccacttcatctccacagtggttatcgtctcgatgatcagcatcttcctcaacccgaattccggcttcatcggtcgcttcttcaatgaaaacggcaagagtgttctgggtgatccgaacctgttcactccgatctactggatcagcgaagtgtggcagcactgcggatggaattctatcatttatttggctgctcttgctggtgttgacacggccctgtatgaagctgcgaagatggatggcgcaagccgtctgcagctcattcgctacgtcgatattccggctattcttcctacctgtggcgtgctgctgattctgaacatgggctccgtgcttaatgtcggcttcgagaaggtcttcttgatgcagaactcgctgaacctgagctcttccgaggtcatttcgacattcgtgtacaagatgggcttcgtgagtaatcagtacagctactcgacagctattggcttgttcaacacgttgattaatttcgtgttcttggtggtggccaacgccatctccaagcgcgtgtccgataccagcatcttctgacggtgacagggcaaagaaaggacattcaaaatgagtaattccgttgcgccagccgtcaagacggccaatgacgagattccatggaatccgaaggttcgccagaagaagcagccggctgactatgtggtcgattttctgatcggtctgctcgtggtcgcagtggtgatcgtggtgctttacccgctgtggttcatcgtgatcgccagcttctccaatgcgtcgctggtttcccagggtggggtcaccctcttcccgaaggggatcgacttcgcgggttatgccaagatccttgatgatgcgcgaatctggaccggttacaagaacaccatcatttactccgtggtcggcaccatcgtcaacatgctggtcacactcccggtggcattcgcgctttcccgcagtgagttcaaagctcgtcgtgtgattctgttcctgttcaccttcaccatgttcttcgccggcggcctcatcccgagctacctgctgttcaaggatctgggcatcctcaactccatgtgggtgttcattctgccgggtgctgtgaatgtgtataacgtgatcatcgcacgttcgttcttcgagacgtccattccggaagaattgcatgatgcggctcaggtggatggtttgggctacttccgctacttcatgaagattgtgctgccgctgagctcggccatcatcgccgtgattgcactgtactacttcgtgggtcactggaacgacttcttcaccggccttatctacatccgcaatcaggagaagcagccgttgcagaacgtgttacagaacatcctgctggccaaccagatgaccacatccggtggcggttccgacggtcgttcgatgctggaacgtcagcaggctgcggatcagatcaagtatggcattatcatcgtgtccaccctgcctctgctggttgtgtatccgttcctgcagaagtacttcaacaagggcgtgatgatcggcgcagtcaagggctgatcgccagttcgcgggttcgttccgctgacacaaagcagttcggacccgcttctcaatcaataggacttcatttccttcctcctttcacaaggctgccgtcgtcatgcggcagcctttttcacatcccaatcgcaatgctttgctgactctacggacgcaagcaacacgaaaaacaaacgatataagcagtaaggtgacatcatgaccgcaacagacaacccattcggctacctgctcgtccacttcatcgaagatccggacggctatgcggaaaagatctatatggatctttccgatggcgacaatccgcgtcgttggattccgcttaacgatggcaagccgatattgacgtctaccattggcaccactggtgtgcgtgacccgcatatcattcgtaatccgcagactggaacttggtatgtgattgccacggatttgcgagtgttcggcggtgataatgcaggctggttcgagtggactcgtcatgccagtacgaatctcatcatttgggaatccgatgacttggtacattggagcgagccgcgtatgcttgacgtttcacgcaagccggacggtacgcatcttgagttgggtatggcgtgggcctgcgaatgcctgtgggttcccgattattatccggaaggtcacgagggtggtcgcggagcgttcgtcatgtactggtccagcacgattttcaacgatgatgatcctgatcatactgatgatggcgtgtgctgcaccgtgctgtggggagccaccactgatttcacgcagcagacgtacgaatacggtggtgtgtttattgatacgggtggcgattccatcgataccaccatggtgcagcgtccactgcctgacggtggggttcgtacgtaccgtattaccaaagacaactctttcggcaatggtatttggatggactctaccgacgctcatcgttggtgggagccggatgcgcagtggacctgcgtgcagaaacatgttggtgccggttatgtgccggacggcaatcctggaggcgtggaagggccggcggtgtttgcaaaccatcacaatgatggctcggatgcggatgaatggtatttgttcgtggacgtgattccttccatcggctatcaaccgatgcgctcgaagaatctggattctggcttcgttccattggctagtcctgattactacctgtccgagcatacgaagcatggcggtgtcgtttcccttacgaaagaggaatatgaccgcatcgcttccgagtatggtttgcggtgacatctgaatcgtcgatgccgaaagagggtatttgttcggccattttcggcatcgacgtcgcctgcgtttagtgcaggcttgatgtcggattcctgaatttcggcacgttgccgcctcaatacgttattataacgttgtaaacgttgatattccttggtatcaaacaaagaagtgccatttcgataatgtgatgaggtagcgtatgaagcgttttgcggtgggctatgaatttctgtgccgtatagtcatgatggtggttgttgccaatgtcgcatttcttgtgcacacgctgctcgggcttgtggtggttggtttcttcccctcgattgcggcgacctatgccacgttccgcacttggcttttggatgttgacgatcgttcatggagtatctcgcgcacatggcgtaccttccatcaggcatggctggaggagcttggtccggcaaataaattcggttggcctcaattcctgatatgggcattgcttatttgggaatactggtttgttcagaataatgatcttggcactactggctttgcggtttcaggtgcgttgctgctgctgaatgtgctgtatggattgtttgtatttgtgagttggggcatacacgtcaatttcgcggagaagctcacgtgggtggtcaagacgtcgttgagcatggtgatcgctcgccccctatgcagtttgatgattgcattgttgttcctcattgtggtgtgggcatactacacatggcctggattgatgattgcttttggcattgcggtgcctgtgtttgctgcgatgatggctatctattcatggggtcgtctgcctggcatggatgtgcatgtgctcgagccagtgcttatcgatgacatgccgaaaaaaacatatgccgattcgcgttcttgaggtgttcttatgcagtattgcgtggggttacagtggggagtggttttatgacgtattactcgtgagtaacgcatgattacgacgcaaaggagcgcgcatatgacttcgcatattctcgaacgggtccccctacagcaggtgaggctactgccaggagagcattttgacgctcagcaggccggcgcgcggtacctgcttgatctcgacgtcgatcgtctgctctacccattccgcagggaggcgggactgccgcagccgaccggtgccgacggcacgttgcattggcgtcgcgcgttggctggtggcgaattccagtatgcgatgcgcgggcgtggtcaggcgcatcgtttggaaatcgaggtgattgccgattccgcggaaagcgacggtgaaaacgcggcgtatgaagtgatgctcgacggcctgccattgcagcgcggcgaacatcgtcgcatcgatggcgatcccacggcaatcgacgtgtatccgctgccggatgccatagaaactgcggaaaccgcggaaaatattgagaataccggagaaaacgacaatgctgacgacgctgcgatcgtacgcatctcggcttcggcgcatgacggcgcgaaaatcaccgccctacgattgcataagtaggattgcagcgatgaaaatcgcgatatggcagacgattgaccgtccgggggcgtctgccatggcgatccggtgattggaggatgctgatacgcattgtggcggcaacgatggtattcgttgccgccacaatgtttttgcggttgctgttccggttgctgttccggctggcgtcggttgccgtcaatgagcgggtgccttgcttgccgccgacggttgttgcgacggttattgggctccgttcgactggtcgtctccggagttgtcgccactgctgttgccgccgttgccgccgtccccggaattgtctccgctgccgtctccgctgttgctgccgttgctgacggttccgccggttccggaattgtctccgtctccgttaccgccgctgttctgatcgctgttttgcgtaggatcgggtgtggtctgctcggtgttctcttcggccttcggcgtctcctggttctgccgtgtttgggccttctgcgcgccggtgccccatgtgccgtccgggccgccgatcttgccgttgtcggtcggttcggtgaaggtcagcacctcctgattctgcaatgcgagcgacatgaactcctcgaacagatgcgacgggtagcccgtggaggaaacgccatagcctgcgaacgatggcacttcctgcgcgctgccgtcttccgcaggattccaaatggcccacacattgagcagctgcggcgtgtagcccacgaacgaagcggccttctcgtcgtttgcggtaccggacttaccggccacctgacgtccgagacgtgtcgaaacgccagccgcggtgccatacgtggtggtgccctgcatggccttctgcaccagatggcaatcgttcgcatcgaacacctgctggttctcctgagccgtcttgtacagctccttcgaaccgtcggacgtgagcaccgtgtcgacgatgtgcagcgtgttcttcacgccatcattcgcaatggtggagtggccttgcgccagatcccacacggtaatgccgttgatgcccagaatgttgtaggtggtgtcttcggcgatgtcttcctcaatgcccgcctgatgcgcgatcttggcgagattcgcggcgccgaggtgcttgttgacctccatgaacaccgtgttcaccgaattcgcggtcgcctgatagaggttgatatacccgtaattggtgttcaacgcgttcggcacctgcgcggtggttcccggcgtcgtttcaaacgtcaggccggaattgccgttgaagatggtgttgaaattcacaccctcctgcgcggctcccagcaagccgaacggcttcatggtggaacccggttcgaacgtggcctgcgtggcgttgttgagctgcttggtgaggtaatcgttgcccgcatacatggctttcacggaaccggtcttctgatcgaccgcaataccgcccacctgaatactttccggcatgccctccggtcgggtgtcgccgacctgctgaatctcgtcctgcatgtccttgtcgagcgtggtgacgatcttgtagccgccggtttccagatcatcggcggtgaacgccttggaattgaccagttcgttcttcaccgtggtcagcagatacccgttcgcgccggccatctggttgctctgctgtatttccgccacggcagggaactgcgcttccttcttctcctgggcggtgatgtagccgtcttccttcatgatgctgagcacgcggtcgtatcgcttttcggcctgttcctgattgacggccggatcccatgagctcggcgccggaatgataccggccaacatggcggcttccgacaaggtcagatcgctggcgttcttgttgaaatacgccttcgccgccgcctgaatgccatatgcgccacgaccaagataaatcgtgttcatgtaattgcatagcacctggctcttatcttgtgcctgcgcgatcttgatggccaggaacgcttctctcagcttgccggaatacgacgtggtttcgcccaaatagtagcgttccgcatactgttgggtgatggtcgaaccgccctgacggctgcctgtggtcagattcgtatacagcgctcgcgcgatgccatacagatcgatgcccttgttggtgtagaaggaacggtcttccgacgcgacgatggcattgcccacataatccggcaataccgcacagtcgatgatttcgcggttctgttccgcgtagctgccaatttccgtagtgccgtcggcatagtagacggtggttttttcggcgagggcgaacttttccggttcggggatttccgtggtgatatacatgtatgcgaacaggccgatacctgccgcgagcagcgctgcgaagatgccgagtacccacttcagcacgagatgcttgcgcttgttctgctttttctgaggtccgttggcgcggtgcgatccgtggttctgcggcttgggcgcgctatgggatgcgttgctgcgattgctgccggcgtcgccgctgcgggcgcttcttgagcgtgagcttacgcttcgtgtgtgtgaaaccataggctccaccgtagctgattgacttgagaaatcaggtgaaaatggggtgagtttgcccttgggagggcattttttgcgcagctcttttacaaatcgacagtttgtgggtcgttgtctcaatatcggctgattttcagggttttatcagtttttcaggtgccttttcgctgtttcgcaggtatgcttgaaatttggtacctgtgaaacgcatatatgcatatatataacagaggagtcgtttacagatgagcattcgtgtagctatcgctggcgttggcaattgcgcttcttcgctggtgcagggcgttgaatactacaaagacacgaaggacgaggataagattcccggtctgatgcacaacaatttcggcggatatcgcgtgcgtgacattgaattcgtcgccgcattcgatgtggacgcgctgaaggtcggcaaggatctgtctgaagccatcgaagcgtcgcagaacaacacgatcaaattcgccgacgtgccgaatctgggcgtcgaagtgctgcgcggcccgaccaacgatggtctgggtgaatactatcgccagatgatcgaagagtccgacgccgagccggtcgacgtggcccaggtgctgcgcgacaagaaggtcgacgtgctcgtttcctacctgccggtcggttccgagcaggccgacaaggcatacgcccaggccgccatggacgccggatgcgcgttcgtgaactgcctgccggtgttcatcgcatccgatccggaatgggctcagaagttccgtgacgccggtgtgccgatcgtcggcgacgatatcaagtcccaggtcggcgccaccatcacgcaccgcgtgctcgcccgtctgttcgaggatcgtggcgtgcgtctggaccgcacgtaccagctcaacgtgggcggcaacatggacttcatgaacatgctgcagcgctcgcgcctggaatccaagaagatttccaagacccgcgccgtcacttccgtggtgccgcacgatatggatccgcataacgtgcatatcggtccgtccgattacgtggcatggcttgacgaccgcaagttcgcgttcgtgcgtcttgaaggcactacgttcggcgatgtgccgctgagcttggaatacaagctgcaggtgtgggattccccgaattccgccggtattgtgatcgatgccgtgcgtgccgccaagatcgcgctcgaccgtcatctggccggcccgattctggctccgagctcctatttcatgaagtcgccggccgtgcagcacgaggatggcgaggcccgccgcttggtggaggagttcatcaagggcgaggtcgaaggcagcgaagagcagcttgacgccgatgtcgccgccgccaaggcagctggcaaggatgtgtggcgcgcctgatttttagttcgcctgatatgaggaatccccaatctaccgtcggtggattggggatttttaattacgatttggaaacgatgcgtatcgtcacttcttgagaaggggttcgacctgttcctcgtacgcggtcaacgcggtatcgatcacattgtgcatgtcgtagtacttgtacgtgcccaaacggccgccgaacaccgtcttcggctcggccttcgcgagctcctcgtacctcgcgtacagcgccttgtcggcctcggtgttgatcggatagtacggctcgtcgccacgctcggcgaaacggctgtactcctcccacaccacggtcctgtcgggattctgcgaggcggcgcgctccggattgaagttcttgaactcgatcgcgcgcgtgtacggcacgtccgcgtcggagaagttcatcaccgggcagccgaaatggtcgccctcgtcgtaacgcacctccttgaagtcgaccgtgcgccacttgagctcgcccagcgagtagtcgaagtagcggtccaccgggcccgtgtacaccaccggcacgccggccgcggccaaagccgccttgttgtacggctgggacccgtcgaagaagtcggtctccagggtcacatggatgcgcggatcgtcgatcatgcgctccatccacgcggtgtagccgtcggccggcaggccctcccacgtgtccttgaaatagcggttgtcgtagttgaagcgcaccggcaggcggttgatgatgcccgctggcaggtccttcggatcggtctgccactgcttgcccgtgtagttcttgatgaacgcctcgtacagggggcggccgatcagcgaaatgcccttgtcgttgaggttctggggatccttgcccgccagctcgccggcctgctcggccacgagcgccttggcttcggcgggcgtgtagtgcgcgcggaagaactggttgatggtgcccaggttgatcggcagggggtagacctcgccgtcgtgcgtggcgtacacgcggtgcacgtagttcgtgaacgaggtgaacctgttcacgtagtcccacacgcgcttgttggacgtgtggaacaggtgggcgccgtacttgtggatctccgcgccggtctcctcgtccatgtagctgtacgcgttgccgccgatgtggtcgcgcacgtcgatgatctccacgcgcacgccgagcctctccacggcctgctgggccacggtcaggccgaacaggcccgcgcccacgaccaccagatcgggatattccaccgcttcagtcataagaacaaccttccgaacttaaaacaaacacacaatattcgtgtgcgattcctcatcaagcatacccgtccgccctccttaacgcgggatgctcatggggaagcggcattttgacgtttgatttccctgtgtcgctggtcgtggggctggctgctccacggatcatggcatggtctgtgtggttcgtgcgcggcctgtggcgcgggttgcgctgcggttcgtgcggcttgcggcgcggttcggtccgggcatggtgtacactggtctttgcctccgcgtggcggtacgtcacccaactcccccagggcaggaatgcagcaagggtaagtggcctcttccgggtgcgtggaggttttcttatatcttcatgccattcgcgcataccgtagagccaatgccgtattctcgatgattatgaccgacgaattcaagccaatcatccgagacccgcacaagtccgcgaatatgctggaacagccggtcgcgcccgttcccgtgccgcagccgccgtctgatccgatcgaacaggtgctttccccacgtgaagtgagcgaagggcttgccgaagccgatccgctgacccgtcatccgcgcgtgtcgagcattatgctcagcgtggtgttcggtctgctgctgcttgccgccgcggtgggcgtctggtggttgggcgtgcgcacgatggaaggccaaagctatgaagacatggtctggtcgaaattcgatgcggccctgccgggatggctggaaccggtcgtgcatgtcttcaccatttccaccgttgtaatcgcaacaagcgcaatcatgtcgataatcgccctcgccgtactcatcgtaagaaaacgatggctgttgattgctcaactggcggtattcggcggaatctgctttgccgcagcagagttgctgaagccgctgctgccacgtccgtacttaatcaatctggaatcaaatcccaataattccgcgccttccgggcatgtcatactcgccgccgcggcaggaatgatcctattatgcgccgtgcctcgcgtatgccgtgcgctcgttgccgtgatcggctggctgtatgcggtactcgtcggattgtcggtgattgcgggacagtggcaccggccgaccgacgtgatcatggcgttgctgatcgtcggcggagtggcaatgatcacgcttgccgcgacgtttgcgaacggcatggatgagcccggttcgcgtgcgtcgtcgccttccgtgcagatcgtcggcagcgtgctgttgacgttcggcgtgctcggcaccctgtatggcgcatacattatttggcagattcagccgggacttgcgatgagtgcggaatggacgaattccggcgcgcacctttccacggtgattctgacggcttccgttgcgtcgttggtgttcgggctggtgttgaccatgcgtcagctgaccgcctcgccattgacgaaacttgggcttgtcggcgcacctccggcccctccgaaacgctgacggcaaaacgtacgatcacgccgaaaatttccggcaccggtcgctcgcgccacacggacggtttgccaactgcatacggtcagtgagtattattgcgttgcaaacgctagtaataaggagtggctatggctaccggcagcaagctcgtgattgtggagtctcccaccaaggccaagaaaatcggtgggtatttgggctccgaatatacggtgatggcctcggtcggccatattcgagatcttgcgcagccgagccaggtgccggccgccgacaaaaccaaattcggcaagttcggcgttgacgtggaagacggattcaagccgtactacatcgtcgacggcaacaagaagaaaaccgtgtccgagctgaaaagcgcgttgaaaaaagccgacaccctgtacctcgcaaccgatgaggatcgcgagggagaggccatcgcctggcatctggtacagacgctcaagccgaaagtgccggttaagcgcatggtgttccacgaaatcacgaaggaagccatcaaagcgtcgcttgacaatactcgcgacgttgacgacgacatggtcgacgcacaggaaacccgccgtattctggaccgcctgtacggctatgagctttctccggtgctgtggcgcaaggttgggccgggtctttccgcgggccgtgtgcagtccgtcgccacgcgtttgatcgtggagcgcgagcgcgagcgtatggcgttcgtgcgtgtcccgtattgggatgtcaccgcaacgttggaggcgccggatgccgatggcaataatgttgcgttcgattctcgtatggtgtcgttgggtggccgtcgtttggctggttccaaggatttcggcgccgatggcaagctgactgcggccggtgcgaaggatcaggtcgtgcagttggacgaggcgcaggcttccgcgattgcgcaggcattggaatttgcaacgtttactgtcgcgtcgatggaaaccaagccgtaccgtcgccgtccggttccaccgtttaccacgtccaccttgcagcagaccgccggcaatcgtctcggcatgagctcgcgtcagaccatgcgtgcggcgcaaggattgtacgaaaacggctatatcacctacatgcgtaccgattcggtgacgctgtcgcaggaagcgatagcagccgctcgtgaagcggtcgtcaagcatttcggcgaaaactatctgtcggatgcgccgaaacaatatgccacaaaaaccgcgggcgcgcaggaagcccacgaatgcattaggccggcgggtgcgaaattccgcgatcctgcggaaatcgcaagcaaagtgccggccgaccagctcaagctgtacacgctgatctggcagcgcacgcttgcctgccagatggcagacgcaaccggttccacggcgaccgtgcgactgtctgcaccgaccgaatcgaatggggaagccatgttccaggcttccggcaccgtcatcgaattccccggctttatgaaggcgagcggtgaaggccgccgcgcatccgccgaatcgaagaagggcgatgctgctggaagcgttgaacaggctgcgcaatccggtaaatccagcaaagcggataagaagtcggatgacaatgtgtcgcttccgccgatgaatccgggcgatgcgctcgccgcggtggcggttggtgcagacggacacgaaactcagcctccggcgcgttacaccgaagcgtcgctcgtgaaaacgttggaacagaaggaaatcggccgcccgtccacgtatgcgagcattatttccacgattatcgatcgcgggtacgtgtatgagcgcggtcgtgcgttgattccgtcgtggctcgcgttctccgtggtcaaattgctggaaacgaagttcccgcggtatgtggattacgagttcactgccgatatggaaagcggtcttgaccagattgcgagcggtcaggagaccggcaggaattggctgacccgcttctatttcggttccggtgagggtgccgcgcagtctgcggacgaggcgcatgccggcttgcagcagcaggtcgcgcagttgggtgaaatcgacgctcgcgagatcaatacgatcgagatcggcgacggtttgcatgtgcgcgtcggtcgatatggcccgtatttggaggatatgaaccatctggatgatgagggcaatccgaagcgtgcctcgctgccggatacgctcgctccggatgagctgacggtggaagtcggtcatgatttgatcgagaaccattccggcggtccgcgcgctcttggcgtcgatccggtttccggaggcaccgttgaagtgcgtaatggtcgtttcgggccgtatgttgcgctggtgatgccttctgccgatgccggcgatgctggtgatgctgccggtggcgctagtgagaagccgaagcgcggcaagggtgcgaagaaagccgctgccgatcgcccgaagatggcgtcgttgttcaagacgatgagtccggaatcgttgacgttggatgatgcgttgcgtctgctgagcttgccgcgtgaagtcggttcgtatgaagaggtggatgcgcagaccggtgaagtgcagacggttaccgtgcaggccaataatggtcgttacggtccgtatttgacgaagaccggtgccgatggcaagtcggatacgcgttcgcttgcttcggaagatgagattttcacggttgatgtggataaggcgaaggaactgttcgcccagccgaagtatggccgtgggcgtggccgtggcgctgcgaagccgccgctgcgcgaattgggcgtcgatccggaaacgcagaagcaggtgaccatcaaggaaggcttctacggcgcgtatatcaccgatggtgagacgaatcgtacgttgccgaagcagtatgctcctgagtcgatcgaaccggccgaggcgttccgtttgctggctgagaagcgtgcgcagggcccgtcgaaaaggcgtggacgtaagaccgccgccggcaagggcggggctaagaaggctggtgctgccaaggcttctaagacttccaaggcggcttccgtcgataaggctcgtgccgatcgccgtgccaaggtgcgcgagttggccgataagggttgggccaacacccgtatcgccaaggagatcggttccacgccgaccacggtgaaggccgatgtggaatggcttgccgccaacgaaggctacacccgtcccgccgtagttcccgcccggtgatgaacagtccggtggactgttcgtagcagtgagcagcggtagcgttgcgaacgccgcaatgtagagtgatgaatatgcaaggcatattcatctcctttgaaggtgtagacggcgtcggcaaaaccacgcaggttgaacggttgcgtgcgtacgttgaggcgcaggggcgcgaatgcgtggtcacgcgcgagccaggcggtactgtgcttggcgtggcgattcgcgagttgctgcttggcggcgtggaaggttccgatgcggatatcgctccgcgtgcggaggcgctgctgttcgccgctgaccgtgcccagcatgttgccgaggtgattcgccctgcactggaacgcggtgccgtggtaattaccgatcggtaccttgattcttctcttgcataccaggctggcggccgcgaattgacggcaggtgaaatccgcgacttaagtatgtgggcaacgtgtgagctattgccgaatcgcacgtatctgctggatcttgaccctgtgcaatcgcatgcacgactgcagcatgatgaagatcgcatggagtctgcaggaaacgatttccaacgtcgtacacgacaggcgtttcttgacttggcaaaggcggaatcgcaacgcttccgcgtgattgatgccagccaatccatcgatgaagtatgggcgcatattcagtctgattttgcgcaaatcagtcaaatgaaagctttccaatcggaggccgcccagtgagcgtgtgggattcgattgtcggccagcagcaggttgtcgaacaactcaaagccatcgcaagtggcgatccgaaagccattgcgcaatcctggttaatttgcggtcctccgggatcgggtcgttccaatgtggcgcgcgcgtttgctgcggcgttggagagccccgatcatggtcttggcgacgagccgaccaaagccgcgcagcaggtgcttgccggcactcaccccgacgtgaccgtgctggccaccaacaaagtgaccatcggcatcgacgaggtgcgaaacatcatcactacgtccgagcagatgccaagcactgcgccgtggcgcatcatcattatcgaagatgtcgatcgcatgctggaacgcaccaccaacgtgttgctcaaggagattgaggagccgagtgagcatacgatttggctcttgtgcgcgccaagtgcgcaggacgtgttgccgacgattcgctcgcgcactcgcatcgtcaatcttgccgtgccttccacgcaggcggtggctgcatttctggagcaaaatggcggattcgagccgaaaatcgcggtgcgtgccgcacgtcttgcggaagggcatatcggcatcgcgcgcttgtatgcgaagaatgagcaggtgatgtctgaccgcgacgagctgattgtgggcgtgcttggattgcgtcgcgcgtcggatgcggtgctgcttgccggcaatcttatcgacaatgcgaaagcgcaggccgaagcggaggtgaaggtcaaagcggcagaggcggaagccgattttcgcagagtcaatgggcttggggcgaaggatcgtattcctccgaagctacgtggcgcatacaatgcgatcgccaaaaaagacgagctgaagcgacagaccacacgccttacgcgtgacgtgctcgaccgtgcgttgaactcgatcgccagtatttaccgtgatgtggccgtgctgcagaacaatgccgaagattcggttggcttgattaatttggagaatcgttcgtcgatcaccgatctgtcggtgcggcttacgcgcgggggagcggtgcggcggctggaagatattgccgttgcgcgtcgccgtctggccggcaacggcaatcccgtactggtcttcgaagccctcttctgctccctcatcgccagctagggctagcggcgttggcacatactgttttccgagggcagattcttccagcgggtggggaaatggttgtttggctgtatgattctggcttgctatcgtgcgataactgccggcaaaattgcaaaaaatgcgatttagcgctggcagttggtggattcgcggacgatgagttgcggcgcgagtgagatgtgcgcggggctgccgggggcgtcgttgagtaggcgtagcgcttcggagacgatttgtttgaacggcgggcgcacgctggtcagcgccggcatggtggtgcgtgcaatcggcgaatcgttgtagccaaccaccagcacatcttgaggcacgcgaagcccgagcgaatgcaacgccaccatcacaccgaacgcgatcgcatcgtcggcgcacaccactgcctccggctgtacgagtggttcggagaacagtcgcatggcgcagtcgaaaccgcgttgcacgctacgatcgccgaacttgttccattcggcttcggtgttcaagtggtgcgcgcgcacctgcgtgtggaacatggcgaacagttccgccgattcgaaggagatttccttgccggccatgtatgccacggatgcgatgccacgttcggccaaatgcctgatcacgatttccatggcggcgttttcgtcgatgctcaccatggatgtgcgggatgagcatcgacggccgcccacctgcacaatcggcaatgtggagtcgtaatgttcaagttcctcggaaaggtaggctccccaggcgggcagtacgatcagcccgtcaacatggcggtccaccaacgattcgatgcgttggatctgcgtggcctgatcgccgccgatgccgagcagcagttgctgcgaatccacgtcgatgacgggttcgatttcgtcaagcagttgcgcgcagaacgggtcggtggcggttggaatcaccagtccgatggtgttggtgacggtgctgcgcaatgcgctcgccgcataattgaccgaatagttgaggtgtgccgcggcggctctcacacgtcgtgcgatgtcgtcgtctttggtgcgttttccggaaagcacgcgggagacggtggcgatggagacgttggccagcgcggcgacgttcgtgattgaactgttcgtcgaagtagccgaagccgaggcgttgtcggttgtgcgtgccatgctctcctcccaaaatcattcgaagtattggattattcgaattgctgccgtgtctcaatcgcgtattcaggaataaaacagccacccgtcgaatgcggcaggtggctgaagcaagtatcgcaatcatgcatatggaattgcgatcgcattgcgatttcataactgaagattgttgaatatcttgcgaaatcctcgaaaatcttcagaaaagaagatcactcggcgttgacgaggatgttcagcaggttgtctgccacggtttcgtcgtcggcgccctgcacgtcgatgaccacggaatcgccctgcttgatgcccaggcccatgatggacaggatggagcctgccggaaccgggttgccgccttccttggcgatggtgacggtgcagccggaggcggtgacggcctgggagaactgtgcggccggacgagcgtggataccgacgggatcgttgatgacggtggtgcgggttgccatgatggacactcctttgagtcgttattgttgattgttttctgttgtgttatttgaaagtcgtgctgcttgccgagtgaaatgcatcggtgcgccgctggtgattactatagcactttttccacgaaacgcagaaaacgtttactggttgtgtgttgcggtttaaagcgtgtatactgtgggcaggctgaaaatgatttaccggcaaagacggtggaaatcattgcggtaactcaacgcgcaaggcaggcgcggaaatcacaagaacacgttcggctcgcgttcctttcgcgagcaaacaacaaacgcaaacgacaaaacaaggaaacaggtcaaaggagttcacatgatcatcaagggtgttggcattggtcgcggcgttgcagtcggcccggtcatccgtatggcgcagccgctgccggaaccgtcggacgccccgcgtgcggaaggcattgccgccgaaagcgaaatcgcccgcgtggaaaagtccctcgcactggtgaacgccgacctgaaccgtcgcgccgaagaggccgccaatggtgacgaaggcgccaagcaggccgctccgattctgcaggccatcgccatgttcgcttccgatccgtcgctggccgaatccatcaaggggctgatccagcagggcaagaccgccgaacgcgcggtgctcgaaggcttcgccgcggtggaagacatgttccgcgccatcggtggatatcaggccgagcgtgccgccgatctgcatgatgtcggccagcgcgtgatcgccgaccttatgggcgctcccgcaccgggcctgccgcagagcgaaaccccgttcgtgctcgttgccgaagatctttcccccgccgacaccgcggcgctcgacatgagcaagaccctcgccatcgtcacctcgcagggcggcccgacctcgcacaccgccatcctggcccgtgcccgcggcatcgtggcggttgtttccgcagccgaagccgagaatctgaccgacggcaccaccgtggtcgtcaatgcggccaagggcgaactggtcgtcgacccgaccgaagaggagatcgccgcagccgaagccgccaagtcccgcgcggccgcagccaaggaactgcgcggcaatccgggctccaccaaggacggccacctcattccgctgctcgccaacgtgggcaagccggccgacgcagctaaggcgctggaatatggcgctgaaggcgttggtctgttccgtactgaattcctgttcatcggcaactccgagccgccgaccgtcgaagagcagacccgcgcttacaccgagctgttgagccagttcccgggcaagaaggtcgtgattcgtatgctcgatgccggcgctgacaagccgctgccgttcctcactccggaagacgagccgaatccggctctcggcctgcgcggtctgcgcaccctgcgcgcccacatggacgtgctcgaaggccagctcaaggcgctcgccgcagccgatgccgccaccgacgcgaacctgtgggtcatggccccgatggttgccgaccagcatgaggctgactatttcgtgaagcttggcaagagcttcggtctgaagttcgtgggtgcgatggctgaggtgccgtcgatcgcgcttatggctgataaggtggccgacgtggccgacttcgtgtcgatcggcaccaacgatctgacccagtacacgctggccgccgaccgtacgctcggttccgttgccaactatcagaccgcctggcatccggcggtgctgcgtgccatcaagatgatctgcgacgcgggcaacgccaagggcatgccggtgggcgtgtgcggcgaggccgctgccgatccggacttggccgtagtgctggccggtcttggcgtgaactccctgtccatgactccggtggcactcgacgacgtgcgtgcctcccttgccgaagtcaccttcgaagaggctcaggcccgtgccgaagccgccctcaacggcgacttctaccacccggccaactgagccgtactagctgtgcctatcgcctgtaacgccttgtttttcaagcgatgtgaggtctgataggccctgtttcccggaccgacccctgcccgcgtgccccacaggctcgccgcaggggtcgtttcgttatgtttcgttatgccgtcaattgaaaccttgtatgagtcagacgcttgagggatactgggtgcatgaagatttccgcagatttcaccgtcattcccgacgcgtttgccaaggcggcgccgcctgagaactgcatcgacggtacgccgattgtttccttccccttctacattgatgcgcttgatcctgcagtgcagttcctgcattgggaattcgttgatccggattcaattccggtatgcggtttccagtggaatcattggtccctcgcgaacctgcccgtggatgcgctgatgtacgatttcaacgattctcacgcgctcgcgattccggctgatttctcgcgcacggtttctgcgatgattcctgaaacggttcagggacgcacgtccgccgcctcgccgttgctgcagggccgcagcagtgatcccgcagtgacgatgcgttacaacggtccatatccgccagatcaggatcatgactactatctgcatgtgtggggtaccacggctccgctcgccggcctcaatcagggattctggctcaacgaaatggaacgtgcgctgcgtacttccggtacaatcgttgatcagggcgctattttcctcactggaaaagcctgatttgtgaaagaggatctcaagtaaggccagaaatttgatttccgcagcaatataacgatataaagatgcggaaatcagaaatatatccgacgaaaacgtattgacaataatcgaaaggattgctgaataattatggcgtgcaccacgattttggttggcaaagacgcaagttatgacggatcgaccatcatcgcccgtaatgaagatagtgcaaatggtgagttttgcccgaagcgcttcatcgtagtcaagcctgaagatcagccgcgcaagtacaagagcgtgctttcgcatgttgaaatcgatcttcctgacaatccgctgcagtatacggctgtgccgaatgccgatctgaaggaaggcatttggggcgaagctggcgtgaacgaagcgaacgttgccatgagcgccaccgaaacgctcaccaccaatgagcgtgtgctcggtgccgatccgttcgtggaactcacgccggccaaaggcaaggaaggcgaagagggctatgagccggaagtcgccggtggcattggcgaagaggatttccttactctcgtgctgccgtacgtcaccaccgcccgtgagggtgtggaacgtttgggcgctctgcttgaggagtatggcacgtatgagatgaacggcgttgctttctccgacgtcgacgagatctggtggctggaaaccgttggcggccatcattggatcgccaagcgtgtgccggacgaagcgtatgtgaccatgccgaaccagctgggcattgacgaatttgatcttgaagatgcgtttggcgagcaggaggaccacatgtgctccgccgatctgaccgagttcatcgaacgcaaccatcttgacctgtcggtggagaattccactccgttcaacccgcgtgacgcgttcggctcccactccgattccgaccacgtgtacaacactccgcgtgcctggtacatgcagcgtttccttaacccgtacgacgagcagtgggatggtcaggatgccgatcataagccggtttccgacgatattccgtgggctcgccagccggaacgcaaaatcaccatcgaagatgtgaagtatgtgctgagctcccactatcagggcactccgtacgatccgtatggaaagcttggcgaccagcgcacccgccacatgttccgcccgatcggcatcaaccgtcagagccagcttgcggtgatgcagatccgcccgtaccgcccgcaggtgagccgtgcgatccagtggatcgcctatggttccaatccgttcaacacgctcgtgccgttcttcccgaacgtcaactccacgccgaagtatttggaagacaccaccacgcgcgtcacgtccgaaaacttctattgggagaaccgcatcatcgcggccctgtgcgattccagcttcgccgacaccgccaacgccgtggaacgctatcaggagaagactggcgcgatgggccaccgcatggttgcctctaccgacgagcagatcgaacgtttggtgggtgacgtgaccgacgaattcgatgcggaagacgaaatcggcgatgttcagcctatggaaccggatgaaatcatcgaagccgtgcgcaacggcgaagcccgtgaaatccttgccgcagccaacgagaccatggccgcgcagctcaaggaggaaaccgacaagcttcttgattccgtgctgtacaccgccagcatgaacatgaagaacggcttccacatgtcggacttctaaaatctcactattcggctctcgtgaccacgttgcgggagccaattattttccgcaatacaacatcgttagaatggcgtgcattccaatttgaagaaaggaaaccccagtgaccagcattgaggatttcaccagccagtacggcttggtgcagaagattgatgcgttcggctatctcgattatttgaagaatgatccggatgctccacgcaagcatggcaaggtcgtgctcgtcaccgccgatactccgctgaaggcgtctcgcggcgagggcaagaccaccaccacgatcgcgctgatcgacgcgttgcgtgagcgtggcattgatgcggccgcagtgctccgtcagccgagcatgggcattaccgctgccggttccaagggcggcgcttcgggcggcggcaaggcttccctgacccaccctgagctgatcgactggggtctgtgcggcgaaatgggcgctatcgaagcggcccagaacctgctggtttccttcgctgagaaggccatcgacgacggcaagctcgacgatatcgccgtgccgcgcgtttccgaagtgccgtcccgttcgctgcgtcagatcgcggtggaccgcggcaagggcaatgtggccgagcgtgtggtgctcactccgacctgcgagctcatgcagatcgtggtgctctcccgttccatggatgagatcgccgagcgcgttgccaagatgattgccggcacgaaggacggcaaggccgttacgttcggtgaattcgttgatttgtggcgtattaccggcattctttccgatgcggtgaagccggcgaagacggaaacggtgaatggttctcccgtgtatgtgcacggcggtccgttcgcgaacgtgtcgatcggcattccgacgctggtttccgtggaaatggcgtgcgccctgcatgatgtggtgatcgtcgaggccggttacggtgctgacgcgggcgctcagaagtggcttgacattgcttgccgcgagtatggcgcacagtggccgtccgccgcgattgtggtgacccgcgcttccacttggcgtgacgatccggcgcttgcctggcgttacccgttccacgtgcagcgtttggaaggtcttgatattcctacgttcccgctgattaacctgtgggatggcgaagacgatcaaattccggcgttgcagcagaccgccaaggatctggagttccgcgagccgattatcggcaacctgtatcgcgatggtggcgatgcgctcgccccgcagcttgacgcgttcgttgacgcggtggtgaatggttccatgccggccacgccgcacagccacaagggtatggctctggtggagaacgtgcgttgggttgccgaaaatgcgtatggtgttccggcagatcgcgtgatcctgaaggacggttttgctgaatcgcttaataaggcggtggacctgtgcgccagcgccggtattgatttcggttcgcttgcactggttgcggtgaagtctccggccacgatgactgacaacgattccgctccggctgaagagcgtacggtgacgttgaagaaggttgaagtgcattccggtgccggtttggtgcatgtgaatctcaccgtttcgctgaccacgccgatgccgaagatcgtgtgataaacgagtcgtagcgttctgatcgcaacattttagggcggtcacttgcgtatatgcgtaggtgaccgcctttttgcaccttaatttcggcggtttctagcgaacgtcgcaacgccatgacctcgaaggaacggaggtaacttcgtcagaagttgccgccccgaaccgtgaggcgggaaacacggtgtgtttccccgtaggtgaggtgagaggttcgcaatatgggcgaacctcgaaggaacggtggaaacttcgtcagaagttgccgccccgaaccgtgaagcgggaaacacggtgtgtttccccgtaggtgaggtgagaggttcgcaatatgggcgaacctcgaaggaacggtggaaacttcgtcagaagttgccgccgttccagccccagtcggtggtggcggtgtagcggatgtacgtgcggtcggccggaatgcccagttccttctccaacgcggccatgatctgctcggtcagcttctcccaagcagaaccgggcacggaacgaccgaacacgttcacctcgacgtatgcggccggcttggaatcgtcaccgccgaaataaatcggcatattgtcttcaaacgggcacatcagccagccttcagacttgccgggaacggcggtgatcgccttgccgtatgcggacttcagcgcctcgcgctgctcggcggtggtggaaacggaaacatgagtgtggatgactggcatgatgctctccttaaattgttggaatcagcctttgcggttcacctccagtctaggcgtcgaacggcgcagtcggggtggctgtgtgagaaattttgggctttgcctgaacggctgccaaggtggtctgcgtgcgcgtgttaaatattcgttgtgagaaaactgattgaacagcttatgaaatttggcctcgttggcgtgatcgccttcattatcgactggggcattctgaatcttctcgtcggcgtattccgcatgcacaacgtgctcgccgcaaccatctcgttcattatttccctgattttcaactacattgccagcatgaaactggtgttcaagcaccgtgacgacatggcccgctggatggaaatcctcattttcgtgattggcgcgctgatcggcctgttcatgaacgacgccattatctggatctccacgtatggcatgaaccatgatgcctacgtgtcgcagagcaccgaatacctgatccgcaccaacgtcggcaagctcatcgccaccgccgtggtgatggtgtggaacttcctgacacgcaaatggttgctcgacgatacgcacaccaacgccatgaaccgtttgcgcaaagccgacaaccgcctcacgccggaagagctggaagccaagtggcagaacagcttctcgcacaagcttggcatatggtcgctggaacacactcccaacggttggcccaagtagtcctgaattcggaaaatctgcctgcacaacccggaaatctgccctgatcaaatctgccctgattcccgactcgcgcagacggccggacagtcctgaatatgaaaaggcggtgcttacacctataaaggtataagcaccgccttttcgtatgctctgcatgctttacgtgcgaaaggtcacacgcttacggtggtaagcatgggctgctcggtggagtccttgatctgcttgaagccgaacagggcgatcgccagcgaggtgagcgccagagccgtcactacaatgaaaccaccgtgtgatcccatacggtcgatgaactggccggcaatcgccgagccgacggaaccgccgattgagttcatcgcacccatccaggccatgccttcggtgaagcgtgtgggcggcaccaagtgcagcatcagctggttgccgttcacccacgtcggtgcctggcatacgccgatgaacaggtagatgatcatgatcacccacagatgtttggcgaacatgaacgagccgatgcctagatcgaccacggcaaggcagaagtagaaacgcttccacagcggaatagtccaattctttgcgccatacacgagcgcgccgatcagcgagctgaacgagaagcaggcgaacacgaaaccggtgtactgcttcatattcgcttccgtggcgaacgcgacgatcgaaatgccggcagccgactggaacgcacccaagccaaaccatgtcacgcacacggcaatcaggcccggcccccaaattgactccttgcgaccggcattcacatccgcggcggcctgatccatggcggcctgcacttcggcagccgttttgccttcggaacgtgcgcgatcgcgggcgtattcgattgccgcttcagcctgcaacgccttggaacgggcggcttcgcgctcgcggtattccttgcgggtcatgcccgcttcgcgagccagctgcgtttgcgatttcggctcggtggaaagctcggtgaggaacatgagcgcgccgaccaccacgcacactccggtgaacgagaacgccaacaggccggaaatcacggccagcgtggaggcgagcggattgccgatcacccacatgcattcgtcgaacacgccggaaagcgaaagcgcgcggttggttttctccgtgtcgcctttaagcagcgtggtccaacgctgacggctcatcgcgccccacggcggaatcgccgccatgaacggtacgatacagaacagaatccacgacggcactcgggcggtgatgcaggaaaccagcgcggtcgccgcgatcatccacacgatgattgtcggaatcgacacctgacgctggccgaacttgtcaaccagcttgccgagcaccgggctcgcaacggccaacgcgatcgcctgcacggccgtcagcgcgcctgccagcgaataattgccgtaataatgctgcacggaaatcgtaatcgtcatgccgaccatcgggaacggcatgcatgcgatcactgaaccgaccgaaaatcgggcggtgtgcggtatgcgaagaagctccgcgtaccctccgaaaagatgttggccgatgcttttggcgccggcgaggactgaattggtcatgttttgccgctcctttctgctcacggttggtgcttgcgtccgctgcgttgcgttgccgcggaccgcttgatatacccttgttctgtcttgattgttttctctccagtcccagtctctcacttcaaccttgcttgaacgtcaatcgattgacgttcaagcgtgttgcatagggggtggagattggttgtgtgccattttcttgaactagacaactctatgcggaggtactgtcgcaacacgcggtgcattgaggttggcagacataattcgattggctattttgtaagtactcaacacacgttcacttggtggacgaaaagatgtccggcgggcgaaaggcggttgttgcaaaatggttgcgcaacgcttccaaagcttgcgattgcaggattttcgttccatcggtcaacgtcagcagtcaatgtcagctgtccggcagcatcttgcggaaaggcggtagggatgcccgcaacaaccatccatttcgtacgtcacggcaaagtcgaaaatccagggcatttgctctatgaacgacttcccggattccacctgtcggaagtgggcgtgcgcatggcgcaggcaaccgcgcactacattgccgtcagtccgcaactcaacacagtttccgccatcttctcgtcgccgctggaacgcacgcgcgaaacagccggcgaaatccttgccgcactcaacgaagtacgtgaaacacgcggtgaaaccccgctggaactcaccaccgacgaacgtatcatcgaagcgcgcaacgaattccgcggcaaacgcatcggctacggcgaaggcgcgctctggaaaaacggcaactggaagctggtacgcaacctgtggaagccaagctggggcgaaagctaccagtcgatcgcacgccgcgtgcaagcgttcgccctcgaaaaagtgggggagcatcccggcgagcaaatcatcgtagtcagccatgaatcgcccatctggagctacaggcacatgctggaaaccgggcacccggaacataatatgctgctacgccatacggcactcgcctccatcacttccattacgtacgattgcgatacgcgcaaagtattgtcgatcgcttacgtcgatcccgcggccgacgtgaaatagcgcataatgcggcatggaatcgccggattggaaacttttgaccgagacacgcgacaatgagtgcggcggttgttgaaagaacggggattccatgcaatcatggaagtgctggatgctgttgggtccagtgaggaaaacaaaatgtcgaagctgcaaaggggcacgcatggctttcactatcaacaacggagcgctttatcagttattcgataggcctcatatgaaaattgccatcgaaagctgtgttggagtggtggaattatggccgctgcaaaccgttcaggagatggagaatgatgcaaagtacacggaagatctgcaagtaagattctcctgcaccatggcaagggcaatgctgcgattgtcccacgggattaacccgtccgtggcggaagccgtgtacgagggaatggacgagattccgggttgcgatccggaaattgtgcaagcgctcacgcgggccaatcaggcatacgatgtgatgcgcaattattccgaaaccaacaatgccgacctgttcttcgaagcggccgacattctgggcatcttcatcgacgcccatgtcgagacggaagtccgcaatatactgcaaaagatcgtggagtacattcggcagagcgtcagcctgggcttcgacggcggagcgctggaagatgtcaactactgctacgctttcaccacgaccccaaggacgctcaccgggcgattcctcgcggcgctcgcggtgggtgacggtctgatgaatctcatgtgcgaaggcattgacgatgtggacgaacagaccgtgcgcgtgctgccggtgatgctgtacatcaacgagttgtgcgagcagatggctgttccgccgatctatgtcggcgacgtgaccttgtctcgaatggttgcgctgcgtaatgctgtgcgtgaggcgggcagggcaacgccactcgaggagaattccttctgcgacaacacattcaccataaccgcggacaatgtcattccgtgcgcgggcatggagtgggatcatcatgcggagtgcctgcgttgggatccgaagagggccgagcaggaagccaaagatgaggatgaacgtaagagcaaggaagcgctcgctgaaaagttcaatttgatgacggacgctatgaaaagtatgagctacatggatgattccgatgattctggtgattcaggcgaaggtgcggatgctgcgtgacgtgggcaatccgagataatccgaattagtgggaattatcgatataggaataagaaaatcccggcacttgcgattgcggtgccgggattttctttatgtagtactgattattgcaagttcggttcttaagttcagtgctgaacaggcatatttcgtcagtgctgtatgttgccgtacgcggtaggatcgtcggaatcgtcggaatcgtcggatccgtacggggtctggccctgcgaatcgttgccgaacgtggggcgatcgaactgcgtctggtcaagctgggtggactgttccggaaccgtaggcagcggaggcatgctcggcatggaaggggcttcgggtgccggggctgcatgcggagttgccggggcggccggagtgtactgggcggctggagcggctggcatcgcaggtgctgcgtactgatcggtcggagttccgtaaggagcgccatacgggttgccgtacggagtgttggtggctgccggggctggggtcggagcgccatacgggtctgcggtgggcattgccggagtcggcgcaggcattgcaggtgccggagcggctgccgtatacggatcagcggttggcgtcggaacagccgctgcgtacgggtcggcgaccggtgccggagtgccgttcggggcgtattgtgcggttgcggtcggtggcatgcccggggctggggcgtagccgttgccggctgccggatcgtcgaagcgtgcgccggctggatcggtcttcttggccatgagcacaatgagcacgatcgacgtggccaggcatgcgatgaaaccgatgatcaacaggagtatgccggctacgccagtcgagctcgatccgccaccgattacggaaatggcgccaagtcccgtcatgacgaggccgacgctcagcagaacgccaccgatgaagtcaatcgcgtagaggatgaccagcgtggtgccggccttgttggtgtcgtgcaggcggcgaacggaaagcgcaagggatggaacaatcgttgccagtgcccaaatggtgttgacgaagcttcgcattccattggctgtattgctgtcgatgatggcgcccaacaccgcgaagatgacggcaaacgcgatctggatgatgaatgtgcacagaacccaccaccagaattcgccgcgggaggcgcggcccttgaacgtggcgtactttttccagaagcggatgaacgcctcgccgatggtgcagttgtaggccggctggtcgagcggagcggtcagtgcgaagaagctgccggacccctgtggctgaggttgcggtgcgccgtattgcggctgctgctggttgtatccggccgcattgccgtattgcggtgcgctgtattgaggcgcgccatactgcggtgcctgctggccgtaatcattctgaccgtaggagccgtaaccgccatattgctgggcctgctgcgggttctgcggattatattggttggggtccgtcattagattaccctttcggaaagtgaatcgacatcaaaaaagtgaagtcgattaacacaatactcttgcatcgccaaaaataccgaaaaatattgcagtgtgggacaatcccgacagaccccgcaaaaatcccctttgacgtggggcatcttctgacgcgttggggaagtccgtcgatggcgcggctcatgcccagcatggtgttgtaaggattggtggctgcgatcatcgggtcaattagctgcaggatgttcatgaccgcgaaaagcgagttggtgcgtgggactggatggcacgtccggtttgcggggcacaatggagcttatgactgaagctgaaaacaccaaaccagaacttcctgagcatgttcgcgtgcgtttctgcccgtccccgaccggcattccgcacgtcggcatggtccgcaccgcactgttcaactgggctgaggcccgccataccaagggcacgttcgtgttccgtattgaagatacggacgcccagcgcgactccgaggaaagctacaaccagatcatcgaagccctgaattggctgggcatcgactgggacgagggcatcaacgtgggtggccccgacggcccgtaccgccagtccgagcgtggcgacatctacaaggatgtcgcagccaagctgcttgaagccggctatgcatacgaatccttctccactccggaagaaatcgaagcccgcaacgtggccgccggccgcccgaaggctttcggttacgacggctacgaccgtgatctcaccgaagagcagaaggccgccttccgtgccgaaggccgcaagcctgccctgcgtatccgcatgcccgatgaggatgtcgcgttcgacgatctgatccgtggccgcatcgagttcaaggctggttccgtgccggattacgtaatcgtgcgcccgaacggcgatccgctgtacacgttgaccaacccggtcgacgacgccatgatgaacatcaacgtggtgctgcgcggcgaggacctgctgagctccaccccgcgtcagatcgtgctctaccgttacctgatcgagctgggcgtggccaaggaaatgccgctgttcggccacatgccgtacgtgatgggccagggcaacaagaagctttccaagcgtgacccggaatccaatctgttcctgcatcgcgacaacggtttcattcgcgaaggcctgctgaactacctggcgctgctgggttggtccatcgccgccgaccgcgacgtgttctccatggaagaaatgatcgaaaagttcgacgtgcgtgacgtcaaggccaatccggcccgtttcgacctcgacaaggccatttccatcaacgccgagcacatccgtatgcttgagccgcaggacttcctgaaccgtgccgtgccgtacctgaaccgcgatggcgtggtctccgccgattcctgggatgcgctgaccgatcgcgagcgtgaggtgctgtccgcttccgtggagctcgtgcagccgcgcgtgcgcctgctgggcgaggtcgccggcatggtgggctcgctgctctccaccgagggctacatcgagcctgatgatgacgccaagaagcagttgaaggattccgctccggcagtgctcgacgccgccattgcggcgctttccgacgttgctgaagatgattggaagaccgacttcctgcatgagacactgaacaagtcgctgatcgaagatggcggttacaagccgcgtctggcgttcggtccggtgcgtgtggccatgagcggccgtcgcgtgtctccgccactgttcgaatccatggagattgttggcaaggagatcaccgtcgcacgcttgcagggcttgcgcgagcacctgtgatgcgctgatggtgtgattttgccgatcgcatgactgtcgacccgctggaatgttccgttccagcgggtttgttgttctgggatgctgtttaagaatggcggaaaatggcgcgacacgccgtgacttgcgcactcctacggattcgcgtatatttatcactcgttgcggttcgcggctcagctgagaatcacagcaataactcaagcccccgtcgtctagcggtctaggactacgccctctcacggcgccaacaccggttcaaatccggtcgggggtacgacggacaacttttcgaagttgccacgcctgccaaattgggatgtggtgtaattggcaacacagctgattctggttcagccattcttggttcgagtccaggcatcccagccaatgaccctcgcagatgcgagggttttttgtttttcgcaagcatgtctgccagtacaacatagtccaagaaaattgcactaccctaggaagcatgactgaattgcagaacgcagcaaaagccgccgccacgcgaccgcgcatccaaccggcggaagaaggcgacgatcgcccgctttccgtatccgcgcgactgggacgattgcaattccaccaatccggcaaattccgcgttctgcagcttgccgacattcaagacgggccgaaagtcagcaaagacaccgtcaaactcatcgaagcgtcactggatgccacaaggccggatatcgtcatcttcaccggcaatcagatcgcaggatatgatcccgcatacgcgcaaaccacgcgcaaacgtcgttggagcgctgccgcggggatttcctccaaaaccgcttcatccaagtcttccgaagcgtcagaacggttcgaagctgcgctggaacgcacctgcgcatccgtgcgcgccactgtcgaacagctcgtgcgtccgcttgccgatcgcggcattccgtgggcggtgacattcggcaaccacgattttcaatgcgggctcagcaatgcggaaatcgaaagcatttgcagggaatttcccggatgcgtgaaccctgagcctacgggaggcgagagcggcctcgggggcgcaaattctgcaaattctgtgggaagcatggattctgcggaagatgcaggtttcgtgcaactccgggcggaatcgtatttgccgaatcagcgcgtattcgcttgcgagccgggcaccttcgcattgccggttgccgatgtggaccatacgatgtccgtgctgggcttggtattgctggattcaggcgattacgcacgttccggcgggtacggaagcccgtccgcggaggcgttgcgatttcttgccgaagtgccggaaatgatggccacgcaatctcagaaacaggcaggatcgcacgaaaccgcgcaatcgcaggaaaaggcagtgccgtgcatggtatttcagcattttccggtgcaacagtattaccaactgttgaagccgactgcggcgaatgcggcgcgtgcgattgaaggctaccgcaatttcgctggaaaacattacgttttggatgaggaaaaaacgcttcccggcagttatctgggggagggtgtcagctgcccggatgccgacagcggtgaattcgcgatattggaacagcatgactattttgcgatttccgcggggcatgatcaccgcaacgcattcgttggaacagtgccggtttcgcgagaaatggcctcggctgatgcgcagacggcggcttcgccaggcaaggttggcggtctgacgatgatcgcgtcgcccaccagcggtttcggatcgtatggtccggtgccgcagaagcgggccgcgcggctgatcgagttcgacatccgccatccgtacgagccgcgtacgcagctgcttgaatacggcgaattagtgggcaaaccgagcgcgggcaaggcgtacgcgtacggcatgaccagtgaatcgaagcctgaatccgaaggcgtggatctgctgcatcggccgacatggtggagcaaactgttgacttggctgcgtaagaagtagctgaaaagagcgaaatgacaaatcctgcaaggaaatggcaaaacttgcggaaggcaggaaatagcaaaaccgtgtcctgcatgcatcgcggaacacggttgagaggctgtatattgcccgtcagcgaccggaagaagccttaatcaaggcgtcggtcaaatacttgccggcagccataaccagcggggcgtaacggcgtccgggattggaccccatacgaccgtccgggccggaaatcgaaattgcggcaatcacctgaccggaagcattgcgaatcggcgcggaaatcgagcatacgccctcatcgcgctcgttgaccgactcggcccaaccgcgcttgcgcacggcggtaagcttggccgcggtgaacttggcgtgacgcaacccctgatgcaggcgttcggaatcctcccaagccagcaaaatctgggccgcggaaccggcctccatcgacagcatcgcaccgaccggaatggaatcacgcaaaccggaagcgcgctccacggcggcgatgcacacgcgcatatcgccctgacggcggtaaatctgcgcggattcgccagtgcgatccagcaacgtctgcaaaatcggcgcggctgcggtcagcaaacgatcctcgccggcagcagcggccaattccgcaaaacgcgagccaagcacgaaacgaccatgctgatcacgcaacacaaaacggtgacgctccaacgcaatcgccagtcgatgcgcggtcggtcgggccaagcccgtcgaggaaaccagctgtccgagcgttgccggaccggattcaagcgcgtcaaggattttgacggtcttgtcaagcacacccacaccggaatgaatctcattgctttgagaagacgtcgtgtggtgggtctcagctggaagctcagtctcatccgactgcgattcaggcatggtggtgcttgtattcgaagaagtcataagagggattatgccatctcacatattgaaatgcaaaatgtacgcaatgtcggactgcggtagagcaggtattttaatctttactcagttatggaaaaagctggaaaaaaatctgaattttcaacgattttgtaggtacatacggggagatatgccacaatcgcggcgattttgacatgatctggagtgaacttggcgcatatgtgatgtgtgcgttgcatgcaagtatctcatataccggcataaacgcgttcgaaccaggctcgaacaccataggcttatagcacgaacaacgcgggttggcaataccgcgaggaaaaagcgaggaaaaattcgaggaggtcccacaatgggaacgacattggccgagaaggtctgggccgatcatttggtacgcaagggtagcgatggggctcccgacttgctgtacattgatctgatgctcatgcacgaagtcaccagtccgcaggcgttcgaaggcttgcgactggccggacgcaagccacgtcaccttgaccagctgatcgcaacggaagatcacaacacgccgactgccgacatcgaccgcccgaatccggataagatctccgcgctgcagctaagcacgctcgaaaagaactgcaaggatttcggcgtacgtctgtgcccgctgggagacgccgatcagggcgtggtgcacgcgttcgcgccggtgctgggcctgacgcagccgggcatgacgatcgtgtgcggtgactcgcacacctccacgcacggcgcgttcggtgccatggccatcggcatcggcacctccgaagtcgaacatgttatggcaacgcagaccctgagcctgaagccgttcaagaccatggccgtgaatatcgaaggtgaactgccgaagggcgtcaccgcaaaagacattattcttgcgattatcgcgaagatcggcaccggtggcggccaagggcacgtcattgaatatcgtggtgaggccatcaagaaactgtcgatggacgcacgcatgaccatctgcaacatgtcgatcgaagcgggcgctcgcgccggcatgatcgcgccggacgaagtgacgttcgaatatctgaagggacgcccgcacgcgccggaaggtgaaatgtgggacaaggccatcgaatactggaagacgctgaaaaccgatgacgacgccgtattcgacaaggaagtgaccatcaaggccgaagatctcgagccgtatgtgacgtggggcaccaacccgggtcagggcatcaagatttccggcgtggtgccggatccggcttcgttcaacgatgaaaccgagcgcaccgcggccgagcgtgccattgcctacatgggcttgacgccgggcatgcgcatcaaagacattgccgtggataccgtgttcatcggctcctgcaccaacggacgtctcgaggatctgcgtgtggccgcttccattatgaaggggcatcacaaggccgaaaacattcaccgcgtgctcgtggtgccggcctcctctcgcgtgcgtttgcaggcggaaaaggaaggacttgacaagatcttcaaggacttcggtgccgaatggcgtaacgcaggctgctccatgtgcctgggcatgaaccccgacaagatggtggcccgcgaacgttccatctccacttcgaaccgcaatttcgaaggtcgacagggcaaggggtcgcgtacgcatctggcgtcgccggcggtcgccgccgcaacggccatccgcggtaccatctcgtctccggctgatctgtgaatcgttgagaatgcttgaaaacctgagaaatcttggatttccggcattctgtgaatcgttacatcgaaagaaatagtgaaatggaaaaactgactactcttaccggcgtggccgtgccgcttcgccgttccaatgtcgatactgaccagattattccagccgtgttcttgaagcgcgtgcagaagtccggtttcgacgacgcgctgttctatgcgtggcgtcgcgatccggaattcgtgctcaaccagccggaatacaagcggggcaagattctcgttgccggaccggatttcggtatcggatcttctcgtgaacatgccgtgtgggcattgcatgattacggcttccgcgtggtgatttcgtctcgtttcgccgacattttctacggcaacaccgcgaagaacggcgtgctggctgcgattatgccgcaggagtccgttgagttgctgtggaagctgcttgacgaggagccgggccgtgatatgacggtgagcctggaggatcgcacggtgacgtgcggcgacgtgacgctgccgttcgaagtgaacgactatacccgttggcgcctgatgaacggctatgacgatatcgatctgacgttgcagtatgaagacgatattgtgacatacgagaagatgcgtgccgaaaagttcccgttcaagccgaagacgctgccggcgaagcgtgagccggagcagttgatcgcgtccgcgcgcgaaggcgaatacccggattggcagggcccgcttgccgatcgcggcatcatctgagttggcgtctggctaggtgcgcgggctgtttgcggggtgattcctccagtgggtggaaggaacaccccgcttgcgttgttgcgcgggctgtttgcgggaggatttttccagtgggtggaagaattgggacgtcgggatgattgtttgcgggaggattcttccagtgactggaaggattgggatgttatgtgatgcgtgagcgggaggattcttccagtaggtggatgtttttggactttgagacggtccgtagcggggtgattcctccactgggtggaggttttgggacgattaggggactcatattgtccggattcttccagtgactggaaggattgggacgttgggattgctgattatgtgagatttgcgcgggttttgcatatgagacgcgctatggtgggcttattgtttcgtgctttcgtagctttcggagagaaaaatgagccagggttttgcgccgttttatgatgtcaatcgcacgtatgaagacaactatttgcaagggccgttcggcgcgtttgccgaagtgttgcgggctgatgcatccgattctgcgggatcggtcacgtctgttgttgctgaggttgcgtccgattcctccagtgaggttcagggcgttcagaccattcaggccgctcaagcgcaggaattccttggttttcgtgtgaatctgccgttcggtattccagctggtccgctgctgaatgagcgtttcaccacggccgctttccgtatgggcttcgatctggcggtatacaagacggttcgttcccgcgcatggggctgcaatgcgttcccgaacgtgctggccgtgcatccgcggaatgccgatggttcgctggttccgggcagtgccgaacttgacgagggtgtgcttgccgatacccgttatgagcttccgatttcgatttccaacagtttcggcgttccctcccgtgatcccgacgaatggcagccggacatgcagaaggcaatcgccgcagccggtgacggccagctgctggtgccgagcttccaaggctcccgcgtggagggcatggatcgtgaagcgtatatcgccgatcatgtcaccaccgcgcatttggttgccgaaactggcgctggcctgatggaaatgaacaccagctgcccgaatgagggacataatcgtctgttgtgccacgatccgcatttggtcggcgagattacggaagcggtgaagaacgaaatcggcgatcgtccgctgatcgtgaagctcgcatacattccgaatgatgccgatctggaaattatggtgaaggaaaccgccggccatggcgcggtgcagggtttctccaccattaacacaatctccgcgaagctggtggatgcgaacggcaatcaggcattgccaggcgcggggcgtgaccgttcgggcgtatgtggcaatgcgattcgtggtgcaggtctcgatatggttggccgcctgaatgcgattcgcgagaagctgggtcttgattttgcgatcgttggcgtgggcggtgtgattcgtccggaagattacaaggcgtaccgcgaggctggtgcaaacgcggtgatgagcgctacgggtgccatgtggaacgcccgtttggcgcaagacattaaagccgcactgtagtcacaggttcaattgcgcctgatttgcgctctgttgcgtttcaccgtcctttttttcccattcgctggaaggattagtgcagcacgggggtagctgtccgtcctgattcttccagtgactggagggttttgcccgctgagatgcagtttggtgggatgattcttccagtgactggaggtttttggacggtggaggggcttgtatcgggaggattcttccaccgactggaagtttttgcccgctgggatgcggtttggcgggtggattgttccagtggctgggaattttggtcgaaagtcgaacgaaattgggagacactgcgctgaacgcggcatttcacgagcccactacatgccttatggcaaactgagggttagtgtgtttcaagcttgaaccgtataagggaagcgaaagaggttgagcgtgtctgacaacaacaacgacattctgcacgtcgaaggtggcaagccgctgaacggcaccatcaaggtgcgtggcgcgaagaacttcgtgagcaaggccatggtggcggcgctgctcgccccgggtacgtccgtgttgaagaatgttccggagattcgcgacgtgcatgtggtctccgacttgctgcgtctgcatggcgtggacgttacggtggatggcgatcacggcgtggtcacgatcgacgccacgaatgtgcagcttgccgatgtggccgacgtggatacgctgtctggttcgtcgcgtattccgattctgttctccggcccgctgctgcaccgtttgggtgaggcgttcattccggctctcggcggatgcaatattggcggtcgtccgattgatttccacctggaaacgttgcgcaagttgggtgccaacgtcgataaggaacataaggacggcattcatatcaccgctccgaacggtttgcatggcgcgaagattcacctgccgtacccgtcggtgggcgctaccgagcagacgttgcttgccgccgtgcttgctgagggcaagacggagctttccggcgctgccaccgaacctgaaatcatggatttggtgtgcgtgctgcagaagatgggcgcgatcatttccgtggatgtggaccgtacgttccgcatcgagggtgtgaaggagctgaagggctatacgcacacttcgctgaccgaccgcatcgaggccgcttcctgggcttccgcggcattggccacgcatggcgacattttcgtcaagggtgctacgcagcctgaaatgatgacgttcctgaacgtgttccgcaagattggtggtgagttcgacattaccgataacggcattcgtttctggcatccgggcggcgatttgaagccggtcgcgatcgaaaccgacgtgcatccgggcttcatgactgactggcagcagccgttggtagtggcgttgacgcaggcgaagggcctgtcgatcgtgcatgaaacggtgtatgagaatcgtttcggtttcacgaagccactggtgcagatgggtgccacgattcagctgtatcgcgaatgcctcggatcgctgccatgccgtttccagcagcgcaattacaagcattccgcggttattttcggaccgaccccgctgaccggccgcgatattgacgtgccggatctgcgtggcggcttcagccatctgattgccgcgttggcggcaaagggcccgtccaatgtgcagggcatttcgctgattgaccgcggttatgccgatttccgtggcaagctcgaagctctcggcgcagatttcgactgatttgttgcttgatttatcgctgatatagcttgattggcttggtaaggccggtgttcacaacagtgggcaccggctttttgcttacatattgccgttgctcgttctcaaaaacttagtaattcagtgtataaattattgaacttaatttagggggttatggcgcataatagtgatgcaaaaagttttattgtttttgaaaataatgtcgattttcggcagagattctttcggaatggcattatgattgtcgatatcgaatggcgtttgcaacgaggtgaacagccgaagatataagggtttccctcatcgttattgtgtttactgcatgtccagacggattctagggatagtcgcaacatcttcgtcgtcaatcgtcctccagcctatccaccagttccgcctttttcgtatattccgtgtttttgtatttcgtgtgtgcgtcgtgcatgagcgcaatcgttccaaccaagcggaatgggtggtggcagaatggaacgcatggcatccaaaggaaaaccctcgccgcgttccgcggtcaaaccgttaagcgacgaacaagtcgcaaagctcgcacagcgtcaccatctcgttgacccaacccacgactttccatgcgggccgcgcaaagccaatgaagccgaaatcgcggcgcagaatccgaaagcgacccatcgtctgctcaccggatgcgacatcgtattccgcaaccgcaccaaactcaaggcgtggggcatcgaacacgtgccggaaaccggtccgttcatcaccgcggccacgcacgtcaccatgtttgacgtgttcgtgcccatgatctccatgttccatcaaggccgccgtccgcgctacatggccaaagccgaaatggcctcgtggccgctgatcggcaaatggttccaactggtaggcatgcagcccgtgcaacgccgttcgggcaaggcgaaagccatcgaggaaacctccgtggaaatccttacctccggccgacccctaaccgtatggccggaaggcacggtaacgcgcgatccgcagaaatggccgatgagcatgaaaaacggcgtgggcatgatcgcgcttgaggcttcgcgccgactcggctaccagattccgctgtattgcgcggtaacgtggggcgcggcaagcatcaaccattggtggccgtggccgcgtaaaaacgtggtcatgtgctacgacgaggcgcttgattatgcggatctgctcgccgattgcgattcctggggtgaggaagtgccggaggatctcgccaacgaacttacccgacgcatccgcgtgcgtatgaccgaagtcatggccgaaatccgcggcgaacaagcccccgatggatattgggattatcgtacgatgagccgagtgaaggactgaatcgaagaaggccgaatcgaaaaagaccgcacacgcgattgctgaaatgcggtaatcgaaatactgccagccgattgcgcatacgtatggcgcgtattgcggcatatatcgcggtgtgcgtagccggcggtagcataggaaaagcaatttttgagccaagactccgggttatgaatgatgcccggagtaatgcaaggagcaaatatgacgaacgtgacggtactgggcgcaggagcttggggaaccgctttcggtcaggtgcttgccgatgcaggcaacaatgtgactatgtgggccatcgaaccggagattgtggaaggcattcgcgaccaccatcacaacggtgttcgcctgcccagcgtgaaagtgctgccaagcaacatgaccgccaccggcgaccgtgccgaagccgtagccaacgccgacattgtgatcgtggccatcgccgcacagttcgcccgcgtcgcgctcgtcgaattcaaggacctgattcccgaaaccgcactcgtcgcctcgctgatgaaaggcatcgaacgcaccaccggcaagcgcatggatgaagtcgttatggaaacgcttgacctgccggccgaccgcttcgccgcgatttccggaccgaacctgagcaagcagatcgctgaccgcgagccggccgcaaccgtggtcgcctgcgaaaatctcgacaatgcgcgcaagatcgcagccgcttgcaccaccgactatttccgtgcgttcgtaacccgcgacgtgatcggcttggaaatgtgtggatcgctgaagaatgtggtcgcgctggccgtgggcatggcccgcggcgccggctacggcgaaaataccgccgccatgatcgaaacccgtggcctggccgaactgaccgccctgggcgaggcggcaggcgccgatccgaagacgttcgccggtttggctggcgtgggcgacctgatcgccacctgcggatccccgttgagccgcaactacacgttcggatccaacttgggcaagggattgagcgttgaggaagccaccaaggtgagcaacggcgtggccgaaggcgtgccgaccaccgatgcggtggtggcgctcggcaagcagtacggcgtgcccacgccgctcgccacggccatgagccacgtgctttccgatggcatctcctgcgcgcagatgctgtccgaacttttcggcgaaggcatcagcgaagaataagctttccgcaacatcgcgattgcagataagaccgcactttcaggtgcggtctttttatttttcgaggcatgcgattgcgtaaaacgtcaatcggaatgtgtcaatcgtcaatcgccatatatttcggcaataatagtaaatctgtataaaaatagtctaatcgtgattagacaaagcgattaagctcggttttttcaggttgcaatcgcatcattccaacgtttgattccgtattctatgattcatgaaaataggacatgagtgacgggcgtgtgtaattatggttcgtcgtgtgtgggctgtggggtgcggtttgtatactgaactgcgatattgcgaatgcgtggtatcgcgggcgaacagaagtgcgaaccggcgcgatattgcgaagacagacagtacagacagtattggcagacggtattgggcgcgcgtgcgttcaacggaccaactgatggagcataagacaaagatggcaaaacagcgcattgtggtgatgtatggcggcaaagccgacgagcattcgatttcctgcatctctgcggcgggcgtgctgcgcgcgttggatactgacaagttcgaagccattgaggtgggaatcaccaagaacggcgagtggatcgtaggcggcgaggatccacgcaagtggaacatgagcgaaggcctgccgatggtggagaagacggattcctccaaagatgtggtgctggatgtggcactcggccaggatggtttcttcgctcgtgaagatgacggcacgctgacttcgcttggccacgtggacgccgtgcttccggtattgcatggtccgtacggtgaggatggcacgattcagggcctgttcgaaatgatgaacgtgccgtacgttggctgcggtgtgctcgcttccgccgcttgcatggacaagcattatacgaaggtattgctggctgcggccggtattcccgtggctccaggcatcacgttggatgtgcgcgattatgatgccgcttccgaattcgccgccgaggcggacgagatgcttgccgcggtgcagcaggccggattgcagtacccgctgttcgtgaagccgtcccgcgccggttccagcttcggcgtgaccaaggtcgaacatgagggcgatgcggccgagcttgccgccgcagtgttcgaagcgtcccaccatgattggcgtgtgctcgtggaacagggcatcgacgcgcgcgaaatcgaatgcgccgtgctctgcccgaaggccggcgaggctccgcaggccagctggccgggcgaaatcgtgcttgacaagcgtgccgagggcgacgaccagttctatgatttcgacagcaagtacgtgaactccgacgcaagccatgtggaagtgcccgcaagcctgccggaagaaactctgaaccgcgtgcgcgaaaccgccaaaaaagcgttcatcgcagtcgacggcgccggcctgagtcgtgtcgacaccttcgtgacggccgacggcgaagtgatggtcaacgaaatcaacaccatgccgggcttcaccccgatttccatgtatcccaaggcatgggaggcgaccggcgtgagctacaccgacctgatcaccacgctgatcgaaggcgtgctgcgctgatttcgattgtggggtggctccgcgcccgatcgtagtgctcgccatgtgatccttttcgttgcggacgcttatggcgacggtcgtgagattgtaagctgatattcagcattcctgtactaaggtgctgaatatcagcattttcgtatatgcaccccgtgcacgtcgtcgcaaaggcaaatatgacgtttccgcagtacccccaatatccgcagcggccgcaacaaccgcatacgcagcagaatccacaacagccatcccaatatcagcaacaaccgcagtatccgcagccacaagccaatccctacgaactgtggctcaggcgcgtgaaaagcgtgttctcccgcatcggcgcaggcatgtgcctgatggtggtgatctggtatgcgcttgcaacggtgctttccggcatgctctatcaggtactgcacaccacgaatctgccgaattgggcggtgtatgtggcatcggatacccctttgtatctcgtggccatgccgctcgcggtactgattatgggcaaatcgtcggtcattgaaacacgcaagttcgacatgaagccgggccaattcttcaaactgctggtcatgtgcttcccgctcatgtatgtgggcagtctcatcggcaatatgttggcgtcgctgctgtccggaggcaaagccagcaattcggtgagcgatctggccatgcaattcgacgtgtggaacgtggtgttcctcgtaattctcggaccgttgttcgaagaatggatcttccgcaaggaactcatcagccgcacgcgcaaatacggcgaaaaaaccgcgatcgtgttctccgcgctgttctttgctctggtgcacatgaacctgttccagttcttctacgcattcgcattgggtcttatgttcggctacgtgtacgtgcgcaccagcaaactgcgttattcggtggccatgcacatgatcgtcaacttcatgggtggcgtggttgcgccgtgggtggtgacgaacattgacatcgacagtctgatgaacgtgctgaccagtgcggaaaacggcgacggaacggccatgatgcagtggatgggccagaatgcgacgggaatgatgatattcggcatctatatgctgctatattacggtctgatcatcgcgggcatagtgttgcttatccgcaatcgcaagaactttgaattctataccgcaccggaagaactgcctcgcggcgttcgcacgagcacggcaatactgaacgtcggtgtagttacttacattgtagtgacggttattattacgtcaatcaatctaatgatgcaataatttcagtataaaaaagtgccgcatgtggactactgcatgcggcactttatatatatgggtcaaccgcgatttcttatgttcgcgaggatattacgattctttgttaatggcgcgattctcaagaaaatcagcattggcgatggaacgtgccacggcgttgatcatgtcgggaagcaacgattccggcttggcgtacgcgcacacttcgacattgatgccgtaaggggagtagccggtcagtcttactttcggagggaagcgcggatcggccaaatcggcggtatcgcgctgcacggcctgaaccacctgacgggtcatctcgtcgatgtcggtaccggccttggcggtaaacggcacacgaaccagcatttcgttggacggattgagtttttccagtgacgcggtgttcagaatcgaattcggaatgatcttgatgttgccattgcgctcgcgcactacggtctgacgccagttgatatcttcgaccacgccatcggtgcccgccacattcaccagatcgcccggctggattacacggccaagcatcagaccgaaaccgccgatgatgttcgcgatcgtatctttcataccgagcgacaccgcaagaccaccaatgccgagcgcggtgaaaatcgtggtcggattaatgccgaacaccggctgcagcacagtgcccacagccaacgtccacaccaccgcgcgcagaatattgatgaaaatcgaagcgttcggcacttgcgaacggtccagcactttactcacgattcgggtaagcgccttgtcgataacggccgcaagcagtgcaacgacaatgagcagaatgatttttccggaattggttttcagccaatccacaacgattccaatcggttccatagtgttctgaagcgtcccttcataagtttgattcgcatgcattactggtgcgcgcgacttgcgttcgctgcgtctgcgatgcgtgttcgcaacttgtgttcgcacatatcctacagtgcgtggctgagtcggtttgagcgtgggtgtgcgggggcgtgcgcgagaacatgtgggaatgcgcgtggtgacatgtgtccggagccgtgaacggactaaagttgaggcatgggcaatgttgtggattatgtgcgccgcgagttccgcgggtttggcgaattggcgttcagcaatgtcgattccttggtgctttccgagctttcctacatgcgattgccgggcttggttccagcattcggcgaggccaagtcggtggcgaccgtgccgatccgtgacttgctgcgcgccgaaagctacgatgagatgtttgtttcgaattcctctgaaatgaatgattatcggctttcgttgctgcgcgcggtttgcgaatcgccgcgattccgcgggttgcgggtgggggagtatgacgaacgtttggatgagggcgagcagcagcaattcgctgcgatgaccttcgatttgggtgccgatttcggcttatatgttgcgttccgtggcactgacggcacgctcgtcggttggaaagaggattttaatatggcggtgcgctgcccagtgccgtcgcaagaatcggcatatcgatatgcggactcgattctggacaggacggaacgtttcctctcggcgaaaaaatcacccgacattatgatcggcgggcattccaaaggcggcaatatggcggtatatgcggccatgcaaatcacgcaaagcgatattgaagcgaccgacgaacgcgcgcaacggctcggactgctgccggcgctcggaggaagcgtgccgggacgcaactgcagaatctcccgcatcttctcgcatgacggtcctggaatgtctcaagtcatggtgcatagccgcgcatatcaggcaatcgcggcacgaatcgacaaaaccgtgccggaatcctccattatcggcatgctgttgcaatcgcaaatcaaaccaaccttcgtcaaagccgacgccataagcattctgcagcatatgggatcaagctggcaagtgacgcaatccggcgaattcgagcaggcaagcgagctgacaggcggtgcgcaactcatcggcaaaaccattgacggatggttcgaccgcgtaagccaggaacaacgggaacgggccatcaaccagatatacgacatcttcgcagccgcggggtacggtaatatcgctgatctggtggcgcattggacggattcgctgccgaaaatcgtggcagccgccagaggtaccgacgtgcaaacgcgcgaactcatcaaagacgtgttcaaggcgattccagccagtgcggcgaaagtcgctgtcggggaactgcgcaacgacaaggagggggatgcgtgatgggcaatattattgactatgcgcgcacggaaacgcgcagtttcgaggcattgccgttccgcgaggccgacgcattggtgttggcgcagctttcgtacgacgaagtaccggaatgcgtgctgcgattggacgatttggtagcgaaatacggtacgttgcaggcgcgtgcgaagcaattcgatattcggcgtccgatcgcatcgttgcgtatgctgcgcaagcccccgtttggcggcgtgacgattgcgcgtgccgatgacgagctgaaccacgacaagcccgtggccgaccatgatgtggagaacgtgggattggtcgatccgcaggtgacgcacgacttctaccatgctgtggcggcgaatccgcggttttccgacgttgagatgagcgcgtattgcgagcagttcgatggtggtgcgcaaacgcagttcgcggcagtgactttccggctgccgtcgggaacgctggttgtggcgtttcggggtactgatgattcgctggtcggatggaaggaagacttcaacatggccttccaatacccggttccagcacaggtttccgcagctgaatacctgaaaaaagtcgcctcgctgtgggatgggccgatactgctgaccggtcactccaaaggtggtaatctggccgtatatgcggccatgaacgccgaagacgagatcaaggaccgcgttgaacgcatttactcgctcgacgggccgggtttccccgaagaagtggtgaaaagtttcgaatatgcgagcgtgagcgaccgcattgtgaaaatcgtgccggactcctcggtggtgggcatggtgtttgaaacccccgaacgttgcgtggtggtgaaatccgacgtggacggcatcatgcagcatttcgccttctcgtggcagatgcacgggggtgaattcgccaaggccgaagatgtggccgacagttcggtggtgttcaacaagtcgctgaacggctggcttgcgggactttccaaagaacagcgtgagcatgcggtcgacgcgctgttctccgtgcttgaggcttccggggcgggcagtatttctgcgatcgtggcggccggtccgaaagtgattcctgaaatgctcggcacatatgttggcttgagcagtgcggatcggcgcaacatcaatcaggcgttggtgattctgttgcaggcggcgctcgctcgcaatccgaaagttcagcgaaagtgaagcgcgaatgaggcgtgagtactgtgcgaacgtgggcgggcactgttcgcgtagcgtacttgtgttgtaagcgtgaattcgtatacgacatttgccgaaattcggtctagacaacttgtacaataaaacgtggttatgaggcaacatgactaattattagggggtactgatgccacgaccacgtagggattcggaaatcctgccagcaaaagatcgtctcgaaaacgccttctgggagctgctttcggaacgcgagtacaacaaaatcaccgtcaccgacatcgtgcgcacggccgacgtgaatcgcaattccttctactatcatttctccggactgccggaattggccgactccgccattctgcacgccgtcgaagacacgccaatgccgggcgtgccagggcgggatttcaatcctgacaccgaatggcgcaagcacgtcaccgcgttgctgcgcgatcccgaacagcgtcagcgtctcgaccgattggccttgctggcaggtccgcacagctcgccggaactcgtttcgtcactcaaggaattcgggcgactcaccatgatttccgtacttggactggatgccgacaacctcgatctgaaaaccgatctcatgctcgatttcaccgtcggaggcatgctggccgtactgcagcgctggccgaaactgcatgaaaaactgccgctcgacaccgtattcaacgaggacgtcgccgtactcgcggcgggcatgttcatgtcaatgtcgaaagcggacatgctcgaatactggcgcaggatcttcagcgaaggattcgtacccggcatggcgatttcgcaacagcagccgccgtctaccaagtgaccgtcgaaagccggctgtgataatccagtggtagaaacgatatagcggcgtttttccgcggattgttccgtggaaaaacgcgaacgtgcgaaatgaacgaacgacggggaggttgtccatgatcaacgaagcttacaaggccatgctcggcggaaaatccgtgatccgcgagctgagcgaatacgcgaccgcgcgcggtgccgaaatcggctacgagaacgtgttcgactattcgttgggcaatccgagcgtgccctgcccgcaaagcttcaccgacgaaatgatcgccctgtaccaagaggcggaaccggtcgcgttgcacggatactcgccgtcgctgggcattacctcggtgcgcacggccattgcggaaagcctcaaccgccgtttcgacatggactatacgaccgactacatcttcccgaccacgggtgcggccggtgcgctggcccacgcactgcgcgtggtgaccaagcctggagacgaagtcatcacctttgccccctacttccctgagtaccagccgtatgtcaacggaaccggcgcgcacctgaccgtggtgccggccgacaccgaaaacttccaaatcaacttcgaagcgttcgaacatgcgctgaacccgggaaccgcggcggtgctcatcaacacgccgaacaatccttccggagccgtctattccgccgaaacgctgacccgactggctgaaatcctgcgcgccaagcaggtcgaatacgggcacgacatcttcctgatttccgacgaaccataccgtgaaatcgtgttcgatgggggtgtgcagccgtacccgagcaagttctacgacaacacgctctcgtgctactcgtactccaagtcgctgtcgctgccgggcgagcgcatcggctacgtggcggtgaacccgcgcgctaccgatgccgaactgatcgtgccgatgtgcgggcagatcagccgcggaaccggccacaactgcccaggatccagcgtgcagctggccgtggccaaggtggtggacgaaaccagcgatctttccgtgtacgagaagaacatgaacctcttgtatgacgcgctggtgcgcctcggattcgacgtggtgcgcccgggaggcacgttctacatcttcccgaaggcgcttgaggatgatgcgaatgcgttctgcatgaaggccaaggattacgacctgattctcgtgccatccgacagtttcggcgtgcccggctacttccgtatggcgtactgcatcgatacggaaaaggtggagcgttccatcgccgcattcgaaaagttcgtgcacgaagtctacggccgctgagccctgtgtgcgctcgctggaggaattcggacgcaaataagccaaaggggtgtgtatctgccttatatatggcagaaacacacccctgtccggagctatctcgcttatatatggcaggtcggttggctaaaacagccaaaaacgtacccccgaagtgctgttttgctgaggacgtctgccatatataagcgagataggcgttcttaagctgtgtggagtgtccgtttctgcagaatcggacgttcataggctggtttttggtgtttggatgtccgtttccggtgaatcggacagttgggctgctgtttttgggttctgtttgtccgtttctgtggaatcggacattcaaagcactctcagtgggtggcgatttcgtcgatcttggtgacgtggccgccgaactgggcgcgcatggtggagacgacgcgcagaatgtcgtccgcgccgccgcgggaagtctggcgggcatacagcgcggccgcggtggagggtgtcggcacgcccagttcgagcgcagcctcgatcatccacttcgcctcgccggattcgttggccaccggcggcatggattccagcgtcggatcggacttgaacgcgatcgccagcaaatccaacagccaggactgtaccacggaaccgtctcgccatgaagtcatcacggccgccggatccttgatgagatcggacttcaccatagtggcgaaaccctcgccgaacgcctgcatcatgccgtattcgatgccgttgtgcaccattttggcgaaatggccgccgccgaccgggcctgcgagcaccagtccggaatcgccttcaggcttgagcgcttcgaaaatcgggcgagcgcgttcgaaatcctcttcgctgccgcccaccataagcgcgtatccgcggtcaatgccccatacgccgccggaaacaccgcaatccatgaaatggatgcccctcggctcaagttcggccgcgtggcgcgcgtcatcggtgtaacgggaattgccgccatcgatgatcatgtcgccgggttccagcagctccgccaattcgttgatggtgctgtcggtcgcctcgcctgcgggcaccatcacccacacgatgcgcggcgcggtgagcgctgccaccatctcttcgaggcttgccacggtgcgatccgattcgggggagcggtcatatccgaccacctcgtgcccggccgccgcgatgcgcttcgccatattgccacccattcggcccagaccgatcattgccagctgcatgatgttcttctttctacggttttgtttgatatggaatttgattgggattggtgccatccacccgctttcagcatcttccgcaacgcagaaaagaagatgcggaaaacgaatggacggcaagttttttgtatttcagatatgttttttcagatatgatgcgcgcgaatcgcaatcgcaattcgtgtgcgaagtgttgcgtcaaagcaccagcgaaagcagcatgacgcaacccaagccggtgaccgacagaatcgtttccatcagcgaccaggtcttcaatgtctgaccgacggtcataccgaagtattccttgaccagccagaatcctgcatcattcaggtgcgagaagaatacggaacctgcgccgatggcgagcaccagcatcgccagatgcgtcgggctcatgccggtggcgagcggcaccataatgccggatgcggtgacggtggcgacggttgcggagccggttgccaggcggatgagcacggcgaccagccagcctgcgatcagcggattcatggcggattcggtgatcgaattggcgatcacgtcgccaatgccggaatcgacaagcgtctgcttgaaaccaccgccggcggcgacgatcagaataatgccggcgacggagctgaacgactgcccgaccatgccattgaccgcgtcgcgagtgaacttctgcatgtagccgagcacaaccatcgcgaaaatcgtggtgatgagcagagccaccagcggagtgccgatgaaggcgagcgcgcgtccccacacggtttcgctctggccggtcagatccacgatggaagatgcgagcataagcacgaccggcagcaggatgacggcgattgcggaagtgaaagacgggcggttttccgcggatttcggggcttctgcctcagcagtgttttctggggccgcgatcggcacccacttggcggcgagcttgccgaacagcgggccggagatgatcacggtcggaatggcgacgatcaggccgagcgccagggtgatgccaaggtttgcgttcagtgcgccgatggcggtcagcgggccggggtgcggcggcacgaatgcgtgcagggtggacaggcctgcgagggctggaatgcccagcagtacgaccggagctttggcgcggcgggcggcgaagagcaccaccggaatgagaatgaccacgccgacttcgaagaacatcggaatgccgacgatgaacgcgatcagtgccatggcccacggcagacgctgcaacggcgtcttggacatgatggtgtcgacgatggtgtcggcgccgcccgacttgaacaggatcgtgccgatgatcgagccgaatgcgataagcaggccgacgttggcgatggtggaaccgacgccggacgtgaaactgtcgaatgccttgtcgtattccacgcccgcgcacacggccatcgcgaatgagccggcaagcagggaaaggaacggatgcactttgcataccgcgataaggagaacgatgatggcgatgccgatgatcgccgcagcaataaggttcatgaatcctcctcgattcatggggttggcttgctagatttgtccgattctggagattcggacatatggaagcccattttgggtgcgtacatgtccgtttccggtgaatcggacagttgggctgctgtttttgggtcctgtttgtccgtttctgtggaatcggacaaacatgcaccggttttgggttttgtctgtccgtttctgccgaatcggacacatgcggactggggaatggtgggttaggcggcctgggttgcggtttgggcggctaccgtcgcggctacggttgtcgcgtaggcgttcagcgctttgatggcacggtcgaccatttcgtcgacgctgccttcgatggagatttccacgccgttctcttcgggggcaagcggctcaagaatggcgaactggcttggtagtagcgcgggcggcatgaaatggcccttgcgttcgctgagcctctgctgaatgagcttgtggctgccgttgaggtgaatgaagaatgtgggcacgtctttggcgagtacctcgcggtagctgcgctttaacgcggagctggacaccacggtgttttcgccgagcgcctcgcgtgccaccatccaggagttgatgacgttcagccatggccagcggtcctcatcggtgagtggaatgccggctgacattttgtcgatatttgcctgcgggtggaagtcgtcgccttccgcgtacacgtatccgagtcgttcatggatggcttctgcgacggtggatttgccgcatcctgcaacgcccatcaccactacgtgaatgctcatgttgctctccttgctattgacgatcctgtgccgctccgcaccaggaataagactactataaaccgtaaaagtagtatcagtcaaataaaaagtactatgaattggaaaaatcgtgtgacttgctatgctgaagatagtgcaaaatggcggtaaatcacgcaatcgcagatacgcaatcatctgcgattggtgattgccgtgcgtgtcgcagaatacgtgaaacataccgtgaaacaaagcaggcatggtgtgaagtggacaagggaggagcgatcgatggctgaaggcacggtaatcgcagaaaataccgtcggtgagctgatgcaggattcggtgagtcgaacgctcgccatcgaaatgcttgacggcgtgtggaaggctggcgaaagccttacgttggaagccttgcaaagtcgtttcggtatttccagaaccgtggcgcgagaagtcgcgaaaacactggaatccatgaatgcggtactcgtcaaacgtcgcatcggacttgttgcacgtccattcggcgaatggcaggcgctcaaccatcaggtgatcgaatggcgtctccactccacgcaacgcgaacggcagctgtcatccctcactgagctgcgactggccgtcgaaccggctgcagcagcttccgccgcacgtcttgcccccctcgacgtcaaggcgaaattccccgtgtatgcggcgcgaatgcggcagatcgccgaagccaacgaggaaggcgaagccgggcttgcgcaattccatgatcttgacgtggaattccatacgctgattctgcatgaaagcggcaatgagctgttcgccgcgctttccgacaccatcgccaccgtgctgcgtggtcgcgtggaactcggcaaatacccgatgaagccgaagtccgacgcacttgacgcgcatgatgccgtagccgacgcgatcgccaagggggagcctgaacgtgcacgcagcgccatgctcgacatcgtcgacgaagtggcacgtgccctcaatttcttctgattttcgcgccaaacttgctttcttcagtgaaaaaatcgcaattgcgattactatgcggccgactcttgccatgcgcgacttttcagacgtaaggcgacatcggaaatacggcatgaaggcagctctgccaacgtttctttcggtgaatatgaagatgccggggaatgcccccggcggcttggagccttccttgttgccaagagaaagcttcactattgcagcaaaattcgcatgcagaatcaatcagtcttggtgattggatttgcatgcgcagttgcaagcaagtgttactttacgctacttgcgggtggggtctttttgcaggagaaggaagatgagggcgacgatcagcaggattgcgatcgaaagcacgcccaccgaagcgttgccggtcagcgacgtggtggtcgcaacgaggaaggtgccgataatcgaagcggtcttgccgaaaatatcatagaaaccgtaatattcgttggcacgattctttggaatgatcttgccgtaatacgagcgcgacaacgcctgaataccgccttggaacaggcctacgagaatcgcaagaatccagaattccgttgcggaacgcaagaagaacgcggcgaacaacacaatgcagatataggcgaccacagccgtggtgatcatggttttcgcgccgaaacgaccggcaagcttgccatacgcgatcgcgctcgggaatgccacgaactgcgtgaccagcagcgccattaccagatgcgtagagtcgatgcccagctgcgtgccgtatgaggtgctcatggaaatcaccgtgttcaccgcgtctatatagaagaagaacgcaatcatgaacatccacaacggcttgttcctgcggattgcacgaaaagtggagccgagctctgcgaatgtgccgcggatggcctcaccggtctgacccgcggtagcgcggtagtgcacctgcttatagctggtgagcagcggaatggtgaacgccacccaccacaatgcggtgattacgaacgaagcgcgcgtgcatgccaccgtggaccatccaagcaacgacggaccgccgaaaatcagcgcgatacaggcgataaacggaatcgtggagccaatatagccccatgcgaaaccatgcgaggacacgcggtccatacgttcattcgacgtgatatcgaccagcatggaatcgtagaacgtgagcgaaccgttcaggccgaccgtggcgagaatgcacaccaccaagaaaacgagccagctgagcggcaacgccatcgcacagcaggcgaccacgcccgtcaggaagaatccggtaaagaacttcaccttcatgccctgcacgtcggccatggatccaagcacaggcatcatcaccgcgatgatcagcgacgcgatggtctgcgcgtacccccatgtcgacacgatattcgattggccggcggactgcagcagcgagtttgcgtagattggcacgactgcggtcgacagcatcacgaatgcggaattgccgacatcgtagacgatccacttcttttcgcgggtggtaagttttgcgttggggtccggcatatgctctggggcagtctctgaggccatgtcggacgtaggtgcggatgcgggcgctgttgcgcgttcggacatgattgttgactctttcgaataaaccgtcaattcactattgtatatattacagttcatcttaagcggctgtaaggggagcgctctgccgttacgcatgaacattgcatgaacattgcgactgatgtgtgatcgacataaaaaatctgaaatatcgaaatgctgcaaataatactgggaatactgaaatgacggagatgaacatgtgcagattgtagattgcaccatctgtatgttgatgtcgtatgttgatgtcgtgaaaaacgttcgcagaacggtatattggaacgtgtcaaaatactgggaaaacacgaactaagtttgctgtgtgtgactgccgccgcgctgttgcgtcggcatatttctgcgaagagtcgaggagtctgtatgagtggggaagttccggacatgcttggtgcgaacgctgaaatattgcgctcgatattgagccagccattgcctgacacgcttgacatgatcatctggcgtggcgtcacgaactccgcgcaagcgtcgccattcgaacgattcgcggcacgacttttggtggaagccggtgctgcgggcatccgagacattgctgccgaaaacgattttgatgtgatccgactgagcacgacgaaacgattctggctgcgctgcaacggcaacgatctttccaatgaacaattcaatgttgtgcaggcggtcgaatcggcgcttaaccgcatcgactatgccgacgacgaagcgcgcagggcggtgcacggaggtatgccggaagcgtgcatcgacgaaaacttctatattgcgaaatcgcaacagtatctgcgaaacgtgtcgggtgcgatcgtggcaatcgacggtctgcaggaaggtgaaaacaacttccgtagaatgaggggtacggaaggggcgcgcggcggaaattgggatatcagcaccagattcgccaatgtttgcgaaaatctcgaattgcctttccgcttgcattaccgatttgacgtcgatgcgtccagcggcgtgatggtagtgcgtttcagcataccgaacacggcgatcatgccggttgcgtcgcaatatcgcgacggattcgcctccgcgtatgccgtgcgattggcgggcatgcttgcgtgggcggcgttctcgtcaagcgtacgactgacgcaagtcgatctgaccggttgcgtgggggatgctgacggcattcccgtgatttccatgggattcgatcgcgtgccattcatgatgggtgcgctgcctgccatgaaaaacggacaatgcgacgtggttccgttggatgtcgatccgctggcgctgctcaatttgctgcgcccggtgcgttatgtgggtttctttgatgggaaccgtgccctgacgccaatcacaccgctggcaacgtcagccgtattcttggagaaacgtgtttccgaatggcaggatcaacgtgcgctgcctgaaggattgcggggattcctacgtgccgaccgtgcctgcgaacttgacgtgatgcatgacgaatcgccggtttccaccgatgatgtgaacgcgatcatggaagaaaacgaaggatcccccatggtcgccgaactccaattggaagccgcgttggcgcaacttggcgaaagcggtgaagcaggtggggtgtgcgaagcgggcggaactgacgagacaggcgtagcgaaaattggcgaaaatggcgaaattccgctctactgcagccgtccaggcgtgcgactcatcatctccctgctagacggcgacgaacacacgcgctactggaaactgccggatgctgtagtcgacgtacaccagaatcttggggaactcgccaaaaacaatggcgactatgagcgcgcggaacgtgagctgcgcgcctgcatcaaacttgccccaaccagcgtacgtttctacgaggaactatcgcaggtatacgcaagaaccgacgaatacggcaaagcggccgacgtgctcatcggcgcgttgaaaatcgcagtgctgcctatcgattgcgaagtactctactatcgacttggctacgcattgtggcagttgggacgtctgccggaagcgctcgcctgctatgcgatgatggtcaacggcggcacgccattccgtacggccgcgcgcgatgaggccgaagaagtgagtaggcagatgggattgccttcgccggatatgaaatatggggatgcgtgcgatgcgctgcgatccggcggcgtgccggttgcgccggaaggcaaggtgttagatacgattgcccgcgccgcgatttgcctgacggatgctggtttcccgctactggctcaggatgcggcttggatgcttggaatgcgcgatggcggtgatgtgatcggcgcggttgcgatgagcctgcgttttggagccgaagggcgttcgaagaactagcgcgacgacgccgggtggggtgtgctgggcggtttgactggctggcggctcgggctatgactggctggcggcgtctatgcgcggggcaaatggtggtttggatgtgctgtctgccgacctgacgcatgttgaccagacagcggcattccggggaatttaaggcgattgctatccacaaatttgcgattggctggggctggttgtatagttgagaagttgtgtgttctgccttgcattcagttgcggggcatcgaacgcgcagacttgcaagtcaatagtaattatagggagtccattatggcagctcgttgcgcagtgtgcggcaagggaccgcagaccggtttcaccgtttcgcactcacatattcgcaataagcgcaccttccgcccgaacctgcagccggttcgcaccaccatcgacggcgagaacgttcgcgttcgcgtttgcgtcaagtgcatcaaggctggcaaggttcagcgcgttgaagcgtgaatcgcgaaataacagcttgaaaccccggtagaccaatggtcaccggggttttgctttatcttgatcccgccagggctttaagcgttcggatttctccactcgatggagaaatcttcccgcttacagtggcgtttgcgtccgtattcctccagtaggtggaggaatactcccattggttggctggtttgcgtcctgatttctccagcgactggagctttttgcccgctaaggggcttgtggacggggtgatttctccagtgggtggaggtttttgcccgctgaggggctggtttgcgtccgtattcctccagcgagtggggaatttgggcggtttgagtcgtacccagtggtagaagccgcatctgtcggcataactggggagaatggtgcgttatgagcaccacactggaaacaccgatttcatcaatcgagagcaaccgccgcagagtcggcgcgctgaaatcgcttggtgtggtgtcagttggcgacgccctgacctattatccgttccgcgtaaccgatccggttcctgcgcgctcactgcatgaagcgaaaatcggggagaaaatggcgttcgccgcgcatgtgctcgaaacgcgcgttttccccatggcacgtcgaggcttccgcctgatcgcaacagtcacggacgacgatttcgcagcgcgtcgcaacaccccaaaatcgttggcgtcgctggtcttcttttcgtatcgcaaatcgtatgttgactgggtgcagcgcaaactgcacgcgggagcgctgctcgtcgtcgcaggcgagccaagcgtgtacgacaatcgtctgcaattcacgcatcccgacctgctcaccatcaatcccgtgcaatcgcagtcggaaaacggggaatggaacgacggtttcggcgatcctgcgaatccgcctctcggcaatctgaaatacgatgcgcaaacgatcgacgaagcgctgaaacgagtttgccgtccacgaccggtatatcatgcaacttcgcgaatttccagcgaacatattcatgaatcggtattgaaatatatggatgcgttgcgcggagccgaatatttggtaacgcaaaatgcagggaatttcttagataatcctacgcaagaaggggattttgatattccccaaattgatcgagaaatacagattaaagtactcggtaatgctattcccgatattattccggaagattttcgtgaggaatatgggcttatgcatcgtgctgaggcattcatggcgattcatgatccggttgatcgcaagaatttcgataacgccttgcaaacgttgcgatatgaggaagcgctgatctgccagaccgcgctcgtcaaatcacgcgatgcatcgcgcaaatccaaggctaccgcatgccctgaaacgcggttgaaagacgatttcatcgcgtcgctgccattcgcccttacgaacggccaacagcaggtcatcgccgatatttccgccgatatggcgcacgattaccccatgcaacgattgctgcaaggcgaggtcggttccggtaagaccgtggtcgcggttgctgccatgatgcaggccgtcggatcaggcggccaggccgtgcttgtagcgccaacgcaggttcttgccgaacagcattatgcgagcatttccacaatggtatccaaactgggaaaaagcgacgcaaattcgagtgataatcagaaaaatctagatgatgccaatgcgcggcgaagcaataaacggtccgcgcaaagttcgaaagatggggaattcgacgcaaaaacaattcacaataatgctgtggataaaggtgtacaacttgcagaccttcttgatttggccgcatctgatgatgtggaaaccggattttccggcaaaggaaacgatatatttggcacaaaagatggggagattcctgtatttcttctcacgggaagtatgcgacttgccgaacgtcgtcgcgtgctcgcagcagccgcatcgggcatgccctgtatcgtcgtggcgacgcacgccgcattttccaagagtttccaggcgccaaacctcaccttggcggtgatcgacgaacagcaccgcttcggtgtggaacagcgcgaatcgttgaattccaagggttctacggcgcctcatctgttggtcatgacggccacgccgattccgcgcaccgcagccatgacctggttcggcgatctcgacatttcctcgctgaccgaacttcccggcggccgcaagccgattcgcacattcgtggtgccggaagacaatgcgtcgttgatgggtgaaatgtttgccctgattcgcaagcgcatcgacgcgggggaacgtgcctacgtggtctgcccgcgcattgacgccgatgccgaagatgcggacggcgcgctggcggcgtcagcggcttcaggctcggaaaccgcaggttcgtcggccgcggcttttgacgacgcctacgatcttggcgaagacgacgaccggcgcgcacaacgccccccgttgcattccgtggcggaaatcgtggagcgtctgcaatcgctgccgcagttcaaaggcattcgattcgccacgttgaccgggcgtgacgatgacaccacaaaatcgcaggtcatggccgattttgaatccggcataacgccgattctggtggcgaccacggtgatcgaggtcggcgtggacgtggcgaaagccagctgcatcgtgattttcgatgcggaccggtatgggctttcgcaattgcaccagttgcgtgggcgcgtcggccgaggcggcaccgattcgggggctttcctgatttcgcgtgcgcccgcggacagtgatgccgcccgccgtcttgacgtgattcagggcacgttggatggtgccgaaatagcgcaggccgatttggaattccgcggcgccggcgacgtgctcggcgacgcgcaatctggcggaaagtcaggtttgaagctgcttcgtgtggttaaggatgtgaagattattgagcatgcgcgggttgaggctacgaggcttgtcgctcaggatcctgatttactcgaacatgtgcagttggccggggcggtgcttgatttcacgcgcggcaatgaaacgttcctgaccagtaattagtttggtgcgattaattaatcgcctggcacgctagagtggtgcgtatgcgcgtaatttcaggacgattcaaaggcgttgcattgaccacgccgaaagcgggcactcgaccgaccaccgatcgcaccaaagaggcgattttctcgcatctcgattcatggggagtgttggacgatgcccgcgtgctcgatttgtttgcaggaaccggcgctttgggcatcgaagcattgagccgtggcgcacgagagctggtggcggtggaatcatccgctccggcggccgcattgatcgcgcagacgctgaccgcgttgaaacataaccgttcgtgggaacatggcatgagtgcccgcgtggtgaaggcgcgcgcggaaaaatacgcggcttcagcttcggccgttgaaccgttcgacatggtgttcatcgacccgccgtacgccttcgaaacgaatgattgcaaccatctgctcgccgatcttgccagccgtgaactgacttccagcaacacggtgatcatgctggaacgatccacccgttccgaagagcccacggctccagaaaactgggaaatcaccgatcggcgcgattatggcgaaaccgccgtctactacattgaacccagcgagccaatctcagataacggtcagcaataatcgcaagaaaaaacttgcgattattccgcgtaaaaacaagcgtttaaaagctagcgtttgcgcggatgggcggcggaaacctcccaaccgagcgccatcaaggtcttgcgatcggccttgtcgagcttggcgcaatccaacgcttcgatcaggtcgggacgcaactcattggttttctcgagcgcctcatcgcggcggaaacgatccactttcgcatgattgccggaaagcagcacgtccggaaccttgatgccacgccattccgcgggcttcgtgtactgtcggtgctccaacagcgcgttctcgcccgtatacgattcctccacgatcgaagcggcattgcccataaaaccgggcagcagccgcgtgatcgcctccaacatgaccgacactgcgacctcgccgccgttcaacacgtaatcgccgatcgaatattcgcgcacgtcaatgccttgcgcgcggtaatactgcggaatgcgcgcgtcatacccttcgtaacggccgcagccgaacagcagatgatcggcatggctcagttccgtcgcatcctgttgtgtgaacagcggggcggaaggattcggaaaaatcagcacaggacctgcggaagattgtgcagtgtcggaatctgcagtatcgcaagaatcgccagtatcgaaggaatccgcagaatcctcaatattttccgtattgtcgattaccgcaggctcaagctgcagcagctcgtcgaggcattcgctccacacttccggcttcatcaccatgcctgcgccaccgccgacaggagtgtcgtcgacggaatgatgtacgtcgtgcgtccagtcgcgcagattgtgcgcggtaacctccacaagccctttcgactgcgctttgccgagcagactgaggttcagcacttcaaaatattccgggaaaacagacacgatatcgatcttcataatgttcagaataccgggatgcctgccaagtggcaggaaacataaaaagtgggcactggattccaatgcccacttgaatggatatgtgatcgaaagcgcgtaatcatgaatgcttacgcaggatcgcaaacgatcacagtcccggaataagacctccaggcggatcgagggtcagatagccctcttcgaggtcgatgtccggcacgagctcgtccacgaatggcacaagcgcgctgttctcaaccacaacgccgtcggcatccttcaccggattggcgagacgaatcttcagcagccattgggccacttctatcacgtcaacgactttgccgaccaccacgcccggttcgagaccaagcatattgtcttcagccagtcgcgcctcaagaccgatgaggtctttcggataccactcgtcggcttcaagcatgtcttccggatcgtccgcctcgccatacagcacaatgccgttggctgcttcggactggtcgcggttgtcaatgccttcgaacttgataatccaacggtttttgaaggtacgggagttctccaccacatactcttcttcgccgtctttcgtgtacaacacagcaccgggagcgaaccggtattccggttcgtccgtaaagatctgcacggtgacttcgcctttgagcccctgcgcacgcccgatacgacagaccctcagcagctcgggctgttgagggtcgtcagaatgcatatcacgcaccacgctaggatctcacctgcgcacgtccatgatgtcgacgcgcaccttgtggtcggacagtgcctgcaccacggcacgaatcgcatttgccgtgcgtccgctgcgtccgatgacgcgaccgatgtcttccgggttgacgcgcacgcgaatgagttcgccacgcgcgttctcatgggacttcaccgaaacgtcgtcgggaaaatcgacgatgttcttaatcagatgttccacagcctgggcgagcatgatcactcagcttccgcagccggctcttcagccggagcttcctcggtagcggcggcttcggcttcagccttggccttggcgtcagcttcggactttgcagccttcagcttctgagcctgagcctcaacggcctcaacgcgagcggcggcatccgggccggcctcaacggtcttcagggtgccttcagcaccgtcaaggcccttgaacttctgccagtcaccggtgatcttcagcaggttcagcacctgctcggtcggctgagcgccaacgccgagccagtactgagcgcgctcggaatcgataacgatggtcgaaggctgggtgttcggattgtaggtaccgatctcttcgatggcgcggccatcacgcttggtacgggaatccatgatcaccacgcggtagaacgcgtagaacttcttacccatgcgcttcagacgaatcttggttgccaaaatggctctccttgtataactaggggtgtgcgtttcgttttctgtgtggggcacggaatccgaaacccacatgttcctcacgtcacgcgatagttagagggcctcgcgcgcgcgaataacttaccaagtataaccgtggggtacggacggatgggtcttaggatgtttcccgctctatgcgactttccgaatccgtgcaaaaccgggaagtcgtttgtctgattctgcggaaacggtcaattatgcggcgaatgtgatgccttgaatgaccgaatcggcagaatcggacatttgctggcattcgtgagatgtttgcgtgggtctacatggcggaatcgtcggaatcaggcaggctggctacacttggaggttccgagtttgcgtatgtccgttcggagtgaacggtttgcatagggggagttgcctgaatgattatcgcgctttggattgcgttgattatttgcgttgtatggattgcgcttggcgagatgccggctggttgggatggccatttgccgctgccgtacttgattgcgttgattccgttgctgtggattccgacgcttgtgatcgccgtcgccggtttcgcgttgcatgagtcggctctcgggggagtcgctgcggtggtctgtcttgcgtcgctgctgcgcaaaatcgcatattggatggaaaatcttaattctcccaatactgcgcagagggttgccgaaaaacttgcggaaaagcgtgaaacatctcgtgaaacaggcaatgaagctgttacggaatccgcgaaacatggtcgtttccgtgtgatgacgctgaactgccgatttggtcgcgccaacgctgcggcaatcgtcagtgcggtcaaaaaacatgatattgcagtacttgcattgcaggaattgacggacgatctggttgcgcaattggacgcttcgggattgtctgatttgcttccgtaccgtcagttgggggagagcaagggaacggacaatggtggattcaacggtgtgtggattcgtattgaaccaagcgacatgtctccggtcactgcggtgattcccgcggccgacgtgccgggcgtgtgcttcccgatcgattcgatgcgcggcatcacgtttgtttcggcacatccgaagtctccgatgcgcggatgcagggaatggtccgccggtatcatcggtttgggggagttggcgaccactcagaagcagggcgacatcaccgttgtgttgggtgatttgaattccggtaccgatcatccaagcttccgcaagctgctgaatgcgggcttcaaggatgcggccttgtgcgaggcgaagggccgtcatgccacgttcccatcatggctgccgtggccgcgcatcattcttgaccatgtgcttttcaccaagggattggacgcttccgacgtgagttcgttctgcgttgaaggtagcgatcatcttgcgcttgttgccacgttgacgttgaagtagttgatggcgattataaggtagtcgattcagctgaaaacagctgattggagtacgcaaaaaggggatgcgattcgtcttgaatcacatcccctttttatacgttaccgttttcgcgtcgcttgctttagtgcagcaagccggacagtccgccgccaaagttcggcggcagctcaccggcatcgcccatcaagtcttgcaatccggcgggaagtgcaggattctgcggcttcttggcaaaagcggaaccgccggaaggcttaccgtcggagttcttgccggcaagcttgtcgcgcaatgccttctcttcagcctcgcgcttcatcggattgccggacttaccgcccttcttcttgcccttcttgcctttgcccttgcctttgcccccgcccatggcagggccgccaaagccaggcatgccagcgccagccttgttgctcatacgcttcatcatcttcgcggcctgctcgaaacgctgcaacagcgcgtttacctgcgaaacggtcacgccggaaccgtaagcgatacgggctcgacgagaaccgtcaataatcgaagggtcacgacgttccgcaggagtcatcgaacgaataatggcttcagtacgatcgatttccctctcgtcgaactgctcaagttctttacgatgcgcggccatacccggaatcatgccaagcagattcttcatcggaccaagcttgcgcacctgttgcagctgatcgaggaaatcatccaaaccaaaggaaccatcggaaatcttgatggcggccttacgagcctcttcctcatcgaactgcttctgcgcctgctcgatcagggtaagaatatcgcccatatcgagaatgcgggaagccatacgatccgggtggaaaacctcgaaatccttcagaccttcgccagtggaagcgaacagaatcggcttgccggtaacggatgcgaccgaaagcgcggcaccgccacgggcatcgccgtcaagcttcgaaagcaccacgccggtgaagtccacgccctcatcgaacgccttcgccgtctgcacggcatcctgaccgatcatcgcgtcgattacgaacaggatttcgttcggctgcacggcgtcgcgaatatcgcgagcctgcttcatcagctcttcgtcaacgccgagacggcctgcggtatcgatgatgaccgtgtcgtacagcttctgcttggccagcgcaacagcgtcacgcgccaccttcaccggatcgccggtggtcagacccggggaagcaacggcttcgccaccatcggactgcacacccttttccggagcgtacacgggcacgcctgcacgttcgccaaccacctgcagctgcgtcactgcgttcggacgctgcaaatcggccgcgaccaacagcggagtgtggccggaatccttcagccagtagccgagtttgcctgcgagggtggttttaccagcaccctgaagaccggcgagcatgatgacggtcggcggattcttcgcaaaattcagcggtcggtcaacgccagcgccaagcacggccgtcaactcttcgttgacgatcttcacgacctgctgggccggattcagcgcctgggaaacctcggtgccgagcgcacgctcgcggattcggccggtgaaggaacgcaccacgtcgagcgccacgtcggcgtcgagcagcgcgcggcggatttcgcggatcgtaccatcgatatcagcctcggaaagcttgcctttgctcttcagatgcttgaacgcattcgagagcctatctgtcaaagaactaaatgctgccataatgtccctcagtctagccgtcccgcgggaaatttcgcattccaattaatggtgttgatgatgttcggttgatattcggtgagatgcttgatgctatttgcatgagaaatgacaatcccgtctcttccaataggagaagacgggattattgcttattaagagcgctgcggattatttgagggtccaggtgggaccctggggagtgtcttcgatggcgattccggctgcgcccaaggcatcacgaatggcgtcggcgcgggcgaaatccttggccttgcgggcttcggcacgctcctccaactgttcggaaaccaaacggtcaagcgcagtatgctcagcggaatcggcaccggctccggcggcgccgccggccgcaccctcgcttacccacggctccgccaacggatccaaaccaagcgtatcgagcatcgcacgcacattcaccaaaacagcgcgaacttcatccttcgcaacatccgaatcaacacgatcggcaagcttcgaaagcaacgtgttgccagaacgaatcgccgtgaaaatcgcagcggaggcgccggaaacattaatatcgtcattcattgcggcgacgaaatcagccggcagctcatcggcggaaaccgaaacgatctcctcacgggacggctgcccgccaacggcggcaccggcacgttcgatgaaattcgacacacgatcgtacgcggactgagcctcggtcaacgtctgatccgaccattccaacatggaacgatactgcacggaaccaagcgcgtaacgcaccacccaagcggaattttccgccaaaaccgccggcacggacaagccgttgcccagcgacttcgacatcttctcacccttggcggtaacccatgcggaatgcatccaacgagccgccgaatcgtaaccggcggcacgagtctgcgccatttcgttctcatggtgcgggaaacgcaagtccagcccgccgccatgaatgtcgaacatatccttcaaatagcggtggctcatcgccgagcattcaatatgccaacccgggcgacccgtgccgaacggagtattccaacgcgcgtcaagcggatcggaatccttcggagccttccacaatgcgaaatcacgcggatcatgcttgtcttccgacatgtccgcaggatcaaccggattgtacttgtcgttgcccgtattgtcgacagacggacccatggcatcggccacctcggaagcggcatcggccacagcggtctgcttctgatgcgtcaactcgccataatgaggccagctggcaacgtcgaaatacacgttgccggtcggattgccgttctcgtcagtcaccacgtagccgtggccgttgtcgatgatctgcttgatcagatcgatcatgtcgatcatatggccggtcgcacgcggctcatacgtaggcggctcaacacccaacgtgttgtaagcctcagtgaattcacgctcgtaaatgtacgcgcgctcccaccactgctgaccggcggccgcagccttatcgagaatcttgtcgtcgatatcggtgacattgcgcacgaacgtgaccttgtagcccaaacgctcgaaccagcgacgcaccacgtcaaacgcgacagccgcacgaatatggccgatatgcggcgagctctgcacggtggcgccacacacgtacatgccgacctgaccaggcttgatcggcgtgaaattcgacacggcgtgcgatgcggtgtcgtacagcttcagatcggcagcggcgctcgccactgcgtcaactgcggttgcggcgctagaaatgttgatattctgcggttcttgcgtgttcgtcataaccacgagagtattgccagaatcggacatgcatgcgagatgaaaatgaacggcaaaacggtttttgttggatttgtgaacatcgtttacgtaggtgatgcaacaatagaacgtatgacgcaatcgcaggtgctgattttgcaacacgttccgtgggagagaccgggacgcattttagacagtctggatgatttgggactgcagtatcaaatcatcaatgtcgccaagcagaagaaaccggatttgcctgattttggcgaggtttccggcgtggtgatcatgggcggcccgatgggtgcgctcgactacgacaagtatccgggattaaaggctgaggccaagctcgcgcgggctgcggtcagcgttggcaagccggtgttgggcgtgtgcctgggacatcagatcatcgccaccgcgctgggggcgaagctgaagtcgggagatgctccggaaatcggttttgcgccgattaaatgcatcgacaagcatgattatttctcgatgtggaacaaaaccgtggatgtgctgcactggcataacgacgtggtgtcgttgccggagggcgcgcagccattggcacgatccgcgaagaccaaggtgcaggcgttccgttttggttccgctctgggcatgcagttccacttggaggttacccctactctgttggaggagtggcttgacgagtcaagcatggtcaaggatctcaaggctgccggcgggtcgaaatcgcagttgcgcgaggcgttcgccgaatataatccgcagttgcagccgcttgcggatcaggtgttttcgagttttgccgctcgttgtaattcgtatgggcagaatttggctcagtcgcagcagggctgatcgccgagttgcgtgcggctccgattgctgcgtagcgctggtggcgattcgcaagttgcggcattgcctgcaggtttgggagatgttcccgctacattggtgacttatgccgacttatgatttgggacttgaacacgtttcgcttgcttttgcgaccaagaatattttcaacgatgtaacgcagggtgtttttgaaggcgaccgcatcggcatcgtcggtaagaacggcgacggcaagtccacgttgctgcatttgttcaaaggcacgcaggagccggactccggtcgcgtgaccattcgcggcgggcttacgctcggcatgctcgaccagcgtgacccgctcgacgacaacgccaccgtgcgcgaagctgcgctcgaaggccgtgaagactacgaatgggctgcggaaaccaagtcgcgcgaaatcgtcgaagcattgcttggcggcatcagcttggaagcgaaaatcggttcgctttccggcggtcagcgtcgccgcgccgatttggcacgcctgttgctcaaggattgggatattctcgcactcgacgagcctacaaaccatttggatgtggtgaccattcactggctggcggaacatttgaagaaccgttggccggccggatccggcgcgctgctgctcgtcacccatgaccgttggttcctcgacgaagtgtgcgaatccatgtgggaggtgcatgacggcgaaatcgagccgtttgaaggcggctattccgcatacatgctgcagcgcgtggaacgcgatcgccaagccgacgtgcgtgaaacgaaacgtcgcaatctggctcgtaaggaacttgcctggcttacccgcggtgcccgcgcccgttccaccaagcagaaattccatgtgaaggccgcgcgtgagctcatcgccgacgtgcctccggtgcgcaatacgctggaattgaagcaaatggccacatcccgcttgggcaagcaggtggttgacctgattgacgtgacgcagattttcgaacatgtgcaaggcgaggccgatatcgatccggacgttgccgacatggaagcgtcggcatcgcgcgtcgatgtggtgccggccatgtatgccgagccgcaagtgcatggttccgtggaagttgccgtcgacgatctgactgatccgcgattggtggatgccggtgttgcagcggcgcaagttgctgcagctgcgaaagaatcgcaagaaattcaggaatcgcaagaaaataatactgatgatcctgcagaagaaattacttctgcagcgcaaaaaattactgttaccggtcgtaagattcttgacgacgtgacatggctgatcgggccgggcgatcgtttcggcatcgtcggcgcgaacggtgccggaaaatcgacgttattgaagattcttgacggcacgatcacccccactgtaggtcatgtgaatatcggcaaaaccgtgaaattcgcggtgctttcacagcgtctcgacgaattggagaagctcggtaaatacaagatcaaggaagtgctgagccgttacaagccgagctatatcgtggacggcaaggaaaccacgccggggcagatgatggagcgtctcggattcgagtcggcgcagctgatgacgccgatcaaggacctatcgggtggtcagaagcgtcgtatgcagttgctgctgatcctactggacgagccgaacgtgctcatcatggatgagcccggcaatgatctcgacaccgacatgctcgccgtgatggaggatctgctcgacacttggccgggaactctgatcgtcgtctcccatgaccggtatctgctcgaacgcgtcaccgatcagcagttcgcgctgatcggcggcaaggtgcgccacctgcccggtggcgtgcaggattatctggacatgactgaggccatcaagaacggcaagaatccgtttgcggacgaaaaggcaggtgccggcaaaggcaagaagggcggttccgctgggactgccggttccacgaccgaaggcaccgcaggcaactccgcaagtgggtctgcgactgctgaaaccgcatcttccgcgccttctacgccgaaactttccggcaaggcctttcacgaagcctccaagcgcgtatcggcaatcgagcgcaaactcgccaaactcgaagagcagaaagccgatcttgagcagcaaatggccgcgcacgaccccagcgactacgagggcctaggcaagctcaacgaccagcttcaagccgtcaccgacgagtccgaagaacttgaactcgaatggatggaactctccgaacagctcgagtagcattcgtatcgcccgcgtcaattaccggacagggtatgcatgttgtggcggcggcgcagctcctccagcgtttccggtgaatgttggccattcgtgcgacagcgatgcgtggcattccatgtgccaatgtcatattcttgttattgcaggaaaccttagctgttcttgtcggagagaccaatggaggtgccttatgaatcaagtgatgcgaagaagcgcctgttgcttgttgtccagcttgttgttgtggtcatgcgttggctgcacgaaagctgcacatgaaagtttcggtgatggctccgtacagagcggcagcgagaatgatgatgccgcaaaacaggcatataaagcatttactgtggacgctctggatcgtgtcgccgtcgatgatctcaatagctcgggcaaactggttctagtaaacaagttgggtgcgaaatccgtacatggcgatgatgctatttcatttacaaaaacagttgatgacagcaatatgtattatgtcatctccatgtgtaagcagaaggagcaggctccttattcgtttgtcctctacaaagatggacagccacacaccctaaccactagggaggcctgtacatctaacggaatagaaacgatctctctcccggcgaagaatttcccagatgccacctcattgtccattatcaatatcggcaatacggatcttgttgtttccgtatatgaagtaaaggaaccccatcatgaataatttcagtcataatgctccctgtcgtcctgccatcatcatggtttgtggcatcacgatgaatgctactgggctagttgttgcaaaactggccgattaggtagatggggtagtaggtgatgttgtggtcggtttcgatgttgccgaggccgaaaactaatccttggcgaaggtgataactttcctctgcgagcacattattaagagcccgatgaaccttgtttgatatcttcttgcgtctggcgaacgtctatgagactgttgttttgcgcaaaagatgctactgcagctggcatgcctccaatgatcagatattttctgaatatcgcagatctgacaacaaaaagggctttcccgcgttgaaacgggaaagccctgtaggtttgggattaggctgattggatcagcgaccggtgatttcggaaccgagcaccttttcgctcaaggccttcggaccgcgcgtcacggcgaccgcaccggaacgaaccagctcgataatgccgtaatgctccaaaagccccagcagcgcatcaatcttgccttcggcaccggtggcttcgatggtcagcgattccggattcacatcgaccacgcgcacgcggaacagacgcacgatctcaagcacgtcggaacggttggattcgtcggcagttaccttgataagcaccagttcgcgctccacagtggtgttcggatccaaatccacgattttcaacacatgcagcagcttgttgagctgcttgatgatctgctcgagcggcacctcatccacatcggcggtcactgtgacacgcgaaatgtcaggacgctcggtgggggagacggacagcgagttgatgttgaacgcacgacgggcgaacaggccggcaatacgtgccagcacgcccggacggttctctacgagcacggaaagcgtatggcgcttggaacccggctgagatgcaggatacattggtagacccttccttactacttactcgtttactcgttgtcggcagcggccttcgggcgctgcagcggcttgattccgggcatataggtgacattgtcgttggaatcgccagctgcgaccatcggccacaccatagcgtccttccacacgcggaagtcgataagcaccgggcgatcgttgatttcgttggccttcttgatcgcctcaatggcttcttcttccgtgaacgcacgcatgccgatgcaaccgtacgcttcggcaagcttcacgaaatcaggaacatccacgatttccggcgtattctctccatccatcagattggtggcggaataatgctcgccgtagaacagggtctgccactgacgaaccatgccatacacggaattgttcagcagcgcgatcttgactggcgtgtgatcgtggaacgcggtcgccagctcttcagacgtcatctggaaggaaccgtcgccgtcaatcagccacaccggcttctcgccctcatggaaacgttcggaaccgacacgagcgccgatggcggccggcagtccgtaacccatggtgccaaggccgccggagctcagccaagaatgcggcttctcgaaatcgatgagctgcgtggcccacatctgatgctggcccacaccggtaacccaaatcgtgtcagaatcagccaggtcggaaagctgcttgatgacccactgcggagcgagcgaaccatcggtcggctcatcccacttgatcgggtacttttcacgccaatcgttgatgatctcccaccaatgcgaagtgtcaggcttgccatgcacggcctgctcgcgcttgatttccggaatgagatccttcagcacggttgccacatcgccaacgatcggcacatccggctgacggttcttgccgatttccgccggatcgatatcaatgtgaatcacacgtgcacccggagcgaaagcgtcaagcttgccggttacacgatcgtcgaaacgagcgccgatcgcaacaagcagatcgcaacgctgcacggcaccggtagcggcaatcgtgccatgcatgccaagcatgccaagcaccttcggatcggaatcaggcacaacaccgcgtgcgggcagcgtggtgacgatcggagcgttcgtgacttccgccagctcctgcacgagcttgccggcatcggaacgtgccgcgccgccgcccacatacagcaccggacggtacgactgctcgaacagcttcgcagcgtcggaaagcacacggccgtgcgccttcgtggtggggttgtagccgggcagaatcatgcgctgcggccacgaatagtacatatcgccggtctgtgcggttttggtgacgtcgaccaccaccggaccagggcggccggaacgtgccacatagtgcgcttcagccagcacacgcggaatgtcctgcgcacgcgtgaccagataggagtgcttgaccaccgggtaggttgcgccgacgatatcggcttcctggaaggcgtcggtgccaatggcgttcacgccgacctggccggtgatgaccaccatcggcacggaatccatgttcgcgtcggcgatcggggtgatcatgttcgtggcgcccgggccggacgtgacgatgcacacgccgacctgaccagtcgatacggcatagccttcagccgcatgacctgcggcctgttcgtggcgcatcagcacaaaacggaagctggtttcatcattgattgcatcgtataccggcagaatcgcgccgcctggaacgccgaaaacatccttgacgcccagatcttccagcgaacgtaccagcgcttcggcgccggtcatcttctcgccgtcaacaatggtctgcttttcagtggttgcggctgccttgggcatgccgctgaatgcctgcaggggcgtaggtaacaccatgttccctctcatattcgctcgtggaactttcttacaggggtatgctgccgcgtttcggtgcacgcaatcagccgaaccccatcatcggaaagcggcgcaatcgcttgtggcgacttgcgaatcgcaatccttcgctagtaatcagtctatgctatcggctgacaggagaatatgccggattcgtgccatattctggcgtattgcgttccgcggcggtatgagagggcggattcgtagctgcttgttatctacctgcgactacttactggtgttttcgccgttgctgccgttactttcgttgccgctgtgcttgtgatgatgtttgcgatgcttacggacgttttgtgcttcaggcttgcgattgtccagtgccttccaaccttcttcggctgcggcgagttgcgccttgcgtttgctggtgcctgtgccggtgctgatgatttcgtcgctttcgcccagcatgacgttcgcagtgaacacttgcgcatattccggaccggaaaccgacatctggtagcgcggttcgccgaagcccatgccatgcgctttgacggtaagcgaggttttccaatcgagggctgggccttccgtcgcgacttccgcaagcgtttcgtcaacaagatgatgcacaacgcgacgtgcctcgtcaatgccatgctgaatgaacgtcgcaccgatcaacgattcgacgatatcgcacagaatcgagcttttatcagcgccgccctgatcgctttcgccatgaccgagcagaatgtacgggcctgcattgagcttttcgcgagcgattttgctcaaggattcctcggaaacggctttcgcgcgcattttcgcaagctgcccctcgttcatgtcggggtgtgccttgtacagggtttccgtggagacgagctcaagcacggcgtcgccaaggaattccaaacgttcgtagttttttgcgcccggattctcgtgcgagaaggagcggtgggtgagcgcttcgaccagcaggtcgggttcgagcgtggtgccgagcgcttcaagcagtgcgttggcggtcatctcgccttcggaaacggcggatgcgtcggcgttgttctgggtcataatcgtcctcggtttcgtagtgggtatgcgacggcgaagctcgccgcgctgttcgggacgttgcgtacgtggcaacaagccagcgaatctggccgattgctatgcaaacaacgatcccgttcagtctactctccacccatgtcgaggcggaaatgcagggaaatgcgcggatactaggtggatgcgatacttggcggatgcgaggtgagatggtcgggtgcatgcgaatgcatatggccaagtgcgcagcctgaaatatacaaaaccctgccacccgtcgatggcagggtttcaatgcttcatgccgttactcggcagccactcacttggtgtggatggagcggacagcctcgcggtacacgcggccgcggtaggcgccgcagctcgggcaggccatgtgcggcagcgccggagcgccacagttcgggcaggtaacggtctgggcggccttggccttccagtttgcgcggcgagaatgagtattcgcgcgcgaggtcttgtacttaggcagtgccattgtgtttcctctgtttcgttcgaacgattgagcttaagcgttcagtatcttaacttgtgctccgtacaaattgcaaaaaccgagcaaaatcagccctgccagcacccggatggaccttactcgttgccttccagccgggccttcaagccttccaaagcggcgaaacgaatatcggtcacatcgtgatgatggtccggatcctcgttcagatcggcgccgcactgagagcacaatcccaagcaatcaggcttgcacagcggctgcaacggcagttcctcgaccaacgtgtcgcgcagaagcgtctcaatatcggcccaggatccgccttcaagcagcggatacgaatcctccgactcgtcttcgccggcgataatgtcgacttcctcttccttgacgccgcccttgccgtttttgccgcccttgccggacgcaacgcttgcggacttgtcttcatatgggaagaacgaagtgacgttcaccgtccaatcgcgcttgatcggtttcagacagcgggtgcattcggcgtgcacgggggcactgatgcgggcgttgaaaatcaggccgtcgacaatggagtcgaacgagccgacaacggtcacatccgcaccctcctcaacgccgacgatctcatcgccgatgccgctcggtgcggggaacgttgcgtcgatctccttgctttgcccggctcgcgaggcgacttgcgccacggaaatcgcccacggggaatcttcgatacgtgccatgttcagccttccattcagctttccggatagtcgtttgcgtcaagatgcggcacatgcgtgctcgcttcgcgctggcgatcatacagtacgttcaatcccgcctgcacgtcgttgccaagcttgccgagctgctgttgcagcgtttccatcaccgtggtgcagtatttgtcagctccctgcgtgagatggtcggccctggcttgcgcttggtcgagaatagcacgcgccttctgccgagccagttcggtcacgttttcctgcccggcgaggaattgcgcctgctcgttggcctcacgtatcgtgtctgccgcacgcgattgcgccgaagcgacgatggcgttggcttgcgtttgcgcgctttccaaacgtcgttccgactcacgcatcaacgccgaggcgcgttccagctgtaccggcatcattttcttcaactggtcgagctgttcggtgaattcgtcgcggtcgacgcgcacgctgccgggaaagaacagtatcggtttcgcttcgtccaatgccgattcgagtttgtcgataatgtcgtacacggtggtgaattcgtcgcggctcaaatcgttggaatcgtccagcggcgcgttgggattgaacgtgttgcgtaaatccggcagatcagacatggaaatcaacggtttgaccggctcggcggcgcgtgccgtggcttgcgccttctgaccggattgggccgcccgatcggtcgggcgttcggcggtcacgtcgtcgccaaactggctgccggccggatcgtacgcattcgtttcttcacccatcatgccctcttttcattattgagcgcttctccgagcagcggaatcacgcaatcgggcaccatgccggtcacatcgccgccgtgacgtgccacatctttcacgatcgaactggagatatgttccaaatcgggcgccgccggcaaaaacagcgtttccacgtcggcaagcttgcgattgaccagcgccatacccaactcggcctcataatcgccattctgccgaagccccttcacgataaccgtcgcaccgaccttcttgcaatagtcggtaatcagtccggttgttgaagcaaccttgatattgcggcaattccgctcttcaagcgccttacggataatctcaacgcgggtctcttcggaaaacatcggtgttttcgccgcgttcaccgccactacgacatgcacttcatcgaaaaaacgcgcgcaacgttcgatgacgtccaaatgtccggcggtcactgggtcgtacgacccggggcaaactgcaattgtcatagcctcaagcgtaccgcgattgcgtgaaattacgcgaagtgtcggcgaatatgtgggttttcatggctatgatggaggcagtggtgccgcggttgcggcgtatttgaggagttgattatggcatgttcgatattcgatgatcgcgacggcttcattgacgaggccgacccggtctcgccgctttccaatcccgacgcgggtaccggcactgcggtgctggaacgccccgaagaggagacgaagctggatgatggcggcaacggcgatgcggatcgtttcgcgcattatgtgtcgcgcgatcgcattgccgagtcccgtcgcaccggccgaccggtggtggcgttgtgcggcaaggtgtgggtgccgaagcgtgatccttcgcagttcccggtatgtccggattgcaagcgtatctacgacgaaatgatgaattccaatttctaatcgttttttatttctttcgtcgtatggtgatcttggaatttcgttgaaatttctgaagattgccgaacacgattacatataaaaatctgccgagatggtctctgtatcgaaattgtttttcgatgattgagattgtctcggcagattttttattgttgtcgcgttttattgtcagcttaccgttttgaaatatccgcgtttagcgcaacgaaatttcgtcgatgcgacgcaattcctcatcgctgaacgtggtgttcttcaacgcgccgatattgtcgagcagctgctgcgggcgggaagcgccgacaagtacggaggtcacgtaaccgtcgtgcagcagccaggcgagcgccatttcggcaagcgtctgcccgcgttcggcggcaagatcgttcaggtcgcggatctgctgcaggcgttccggcgtcaacgcgctttcctgcaggaatcgaccgtcgtgcgcgatgcggctgtctgcgggcacgccgttgagatagcggttcgtgagcagaccctgttcgagcggcgagaacgtgataagacctttgccaagctttttggcggttttcttcaatccgttgcgttccacggtgcggtcgaaaatgctgtaacggttctggttgatgatgaacggcacatgcagctcatcgaggatcgcggtggccttttccagcgtcggaccatcgtaattgctcaggcccacgtagagtgccttgccgctttgcacggcggttgccaacgcgcccatggtttcttcgagcggcgtggaggaatccatgtggtgatggtagaaaatgtcgacatagtcgagaccgaggcgttcgaggctttggtcgagcgaggcgagtagatatttgcggctgccgagatcaccgtaggggccgagccacatttcgtagccggctttggtgctgatgatcagttcgtcgcgatgatgatggaaatattcgcgcagcagacggccgcagttcttttccgcactgcccggctcgggaccgtaattgttggcgagatcgaaatgtgtgatgccgttgtcgaatgcggtgaacacgatgtcacgcatagtggcgtacggcgtgatatcgccgaaattatgccaaaagccgagcgaaaccgctggaagtttcaggccgctctcgcccacatgattgtaggtcatggaatcgtatcgagcgggtgacggcgtgtagacggtggtcggttcaagcatggttcctccttgaaaactctgcgtattccgctgtgcgctgtgttgcttgagttggcgcatgtcgtaagtttgtcgacgatactatcgtcgcacttcaagtaaacttgaatgcaagtatcgtcgatagtgtgttttccgatgattgacaatcgcaaggaatcgcaaaatcgctagaaaaacctagaaaatcgtagaaatgagaaggggaatggcaacatatacgattcgtgaagtcgcgcaacgattccatgtgcagacgtcaaccttgcgctattacgaggatcaggggctgctgtgcgacgtggagcgcgacgatgcggggcgacgcgtgtacaccgactcgcatatcgggcggctcgaggcgatcgcctgcttcaaacatgcgggcatgagcatcgatgaactcaaacgcttcttcgcatacgaaaaagacgagcgtgcgcacattgcggacatgctggaattgttggaatcgcggcatcaagcgattttgaaacagcgggccgcgctggaagaggcgtacatgcatgtgttgcgcaaactgcacttgtatcgcgatattcagcacagcatcgaaacgggggcgccatacccggattgggcgaattatgatggcaaggattttcgcgccgacgatcagtgaagttcggtggactgacgaagatcagtgaagactggttggcgaagggcggtgacgcccagttggcgaaaaagcggaaaataaaaggtgtggaaccgcaaactacagttccacacctttagaacacctagcagaacgtctaatagagactgctgcgactcgtttcagccctacttcagcagagtggccacggatggcagcagggcgcgcaacgccttgccgcgatgggagatggcgttcttttcggccggttccatctgcgcggacgtgagcttctcgccggcttcgacggcacgcgccggctgatcgtcgggcacgaacagcgggtcgtagccgaatccatgctcgccatgaggctcatgcaacagcacgcccggcatttcgccggtttccacgatttcctgagcgatcgcataacgaccatcggcgcctgcgcctgcttcggtttgcggcaccaccagcgcggccgcgcaacggaaacgcgcggtacgcttggcatccggaatgtcggcgatctgcgcgagcagcagcgcgttgttggctttgtcatcgccatgcttgcccgcccaacgtgcggaaagaatgccgggggcattgcccatcacgtccacaatcagaccggaatcgtcggcgattgccgggcagcccgtacgtgcggccacatcacgggccttgagcagcgcgttctcttggaaggtcacgccatcttccaccggatccggcagattcagcgaaccggccgacaccagctccacctgatccgcgtccgcacccaggcaatcttccagaatgcggttgatttcaacgagtttgccctcgttatgcgttgcgacgatgattctcacgttccgattcctttcgttgctgttcgttgcttcgttgatgtcggcttgcctgacgtgcgtttgacgtgccctgacttgcctaacctacgattggtttgcgaggccagcctgcggtcggcttacgtccgacttgcagccttcagtcctgtgcgagcgcggactgctgtgcggcctgcagttccttgttgcccttttccgccaggtcaagcagcgcgttcaactcggcgcggttgaacgggcggtgttcggcagtgccctgaatttcaatgaattcgccggaaccggtcatggccacgttcatatcggtcatggccttgctgtcttcgatgtacggcaggtcaagcatcggtgtgccatcgatcacgcctacggacacggcggaaacgctgtctttgatcacgcgcttggcggacctgatgtgcttgtgcttctcggcccagtgcatggcgtccacgagcgccacatatgcgccggtgatcgacgctgttcgggtgccgccgtcggcctgcagcacgtcgcagtcgatctgcacctggttttcgccgagtgccttcatatcaaccacgccacgcaggcagcgaccgatcagtcggctgatctcatgcgtgcgtccgccgatcttgccgcgcacggattcacgatcggtgcggtctgcagtggctcgcggcagcatcgcatattccgcggtgacccagcccaagccggagtccttgcgccaacgcggcacgcctgcggtgaacgtggccgtgcacatcactcgcgtattgccgcattccacaagcacggatccttccggaacatccgtgaaatgacgggtgatgcgcaccggacgcagctcatccaccttgcgtccgtccgcacgaattaccgtctgcccgtccaacatgtctttaatcgctaccatcgctgatttctctgctttcgattgattacacgatcaacaatcgtttgtattttccgaaaaaacagtatcaccagccgaaaacccgtctttccgtcttgaactcgcctcttgctgcacctcaatttgcctatcccaatttgcgtcgtgcccgaatttgcgcgcatctcacgtttgtctcacgtaatacaggcatgcaagcacgtatgatggaacgaaaacctgtgcttggccacggcgaggcctacacttatggtcagtttcaccaaaagtcagaaaggctttggaaatgctggattattcacctgcactcatgaccgacatgtacgaatacaccatgcttgacgcgtgcctgagggacggcaccgccaatcgcaagtgcgtattcgagattttcacccgtcatctgccgcttggccgccactatggggtggccgccggccaaggtcgtattcttgacgcgcttgaaaatttccatcttgacgataatgatctgaaattccttgcagatcgcaaagtagtgggccccgaaactatcaaatggcttgagaatttccatttttccggttcgatcaagggatatcgcgaaggtgagatgttcttcccgaattcgccgattctgcaagtcgaaggcacgttcggcgagtgcacgctgctggaaacgctgttgctgagcattctgaattacgattccgcggtcgcgtcggccgcgtcccgcatggtcagcgccgcgaaggatcgcccgtgcatggatatgggcgggcgccgtacgaacgagtgggccgccgttgccgctgcccgtgctgcggtagtgggcggattcaagggcacggccaatctgctggccgcgcaaatgtatggcttgaatgccatcggcacggccgcgcactgcttcacgctggtgcatgatgatgagcgcagcgcgtttgaatcgcagattgccgcgctcggcaagaacaccacactgttggttgacacgtacaacattgaagaggccgtgaagacagctgttgacgtggccggacccgaattgggcggcgtgcgcatcgattccggcgatctggcgtcgttggcgcagcgcgtgcgcaaccagctggatgcgttgggcgctaccaacacgaagatcaccgttaccaacgatttggacgagtatgcgctcgcttcgctgcaggccgcgccggtcgattcgtatggcgtgggcaccatgctcgtcaccggatcgggcgctccgacctgtgcgatggtgtacaagctgactgaacgcgagaattccgctggtgacatgcagccggtggccaagaagtcgaaagacaaggccacggttccgggccgcaagctcgccttccgttcgtacgagtatgcgctggccgactgcgaacatgtgatttccggctccgaagagcagctggccgcctatcagccggaagaaggctggaaggatctgctggtcggctacgtgagcaacggcgaaatcaactccgattatcagggacacgaggccatcgtcaacgcgcataattaccgcgcccaggcgctggccgaactgccgatcggcgcgcaaagcctcatgaagggcgacccggtaatccctaccgaaatcaccgtcctttgactcgtgctaccatcatgctggttgcgtacggcaatcaatctcgtaatcaaccagcatgaaggggtaggattacatgcgagcattttctctggttacgttgagtccggaggcgtttgacgatttttccgcgcatcacgcggacggcaactttcaacagacctctgccgcaggccgtctgcgtgccggccaagggatcgaagtggaataccttggcgttcaagaaaacggcacaatcgttgcgggagcgctgttcgaaacgcatcgcagccgcctttccaccttcagtgtggtgcacgacggccccttgtgtgactatcgcgatcgcgaattgaccgaatatttcatgacccaactcaagcagcacgcgaaggcgaaaggttccgcacagatggaaatcgtgccggaaatgccatactgcctgcatgactcgcgtggcggcgaactgccagccgaccaaggtggcgctcctgctgatgatgccgtggaaacgttgaaaaacctcggcttcatgcatgacggcttcaccatcggctacactgcggtgccgcgctggcgttacctgaaagacctgactggcattaccgacgaaaagtcactgctcaagtcgtatgacaagcgcacgcagtggagcgtgaaacgtgccgcatccatgggcgtgcatgtgcgcgagctaggcgaagacgagctgcaggtgtttgccgacatcgagcaggccaccgccgaacgccgtaatttcgaatatcgtggtgaagcctacttccgcaagttcaagcaagcttatggcagcaaagcccacttcatggtggcgcagattcacatcggcgaatacattgccgacatggaatccaagtgtgacgccttgcggaagaaggtcgatgtgctgcaggccaagtacgacgagcatccgaccaccaaaacggaacgccagctaggggaggagtcccgaaacttggcggcggcggaaaaacgtttgaccgaggcggccgagtacgccaaagacggtgacgtgcttccggcggcagcatccctattcgtggaacacgctcgtgaaacggtgtatctgttctcaggcagtgtggaaaagtacaagccgttctacgcttccgcgctcattcaacatgatgccatgctgcatttgtgtgtggaacgcggtgtgacccgctacaacttctacggcatcaacggcgtgttcgacgatccggaagatgagggtcgtggcgtactcgaattcaagcaaggcttcaacgggtacgtcgaggaactcatgggctcattcgtgcttcccgtacgcccgctgaccttcaaactcaagaccgccctccgcgaactcctgcgccactagctattagctcaccttccgcttggaggattctgggtgggggcttataggtgcgcgagggttatgtgaacgctgttgacggcgactgtaggccggactaggttatcgcttttggtgaaaagggattttagccagttgggatagtgaaaggtagttacggatcgtgatgcgcgaagtgaatgcgagtgaggaacaagagcaagaatcgtctgaatggaatgtgcgcgagctgagcggtagtgagtttgatgagctttccgccgcgagcagatacggcggattccagcagacttccgaaatggcggcattggctcagtccgacggcatgcaaacgcaatacgttggattggtggattcgcacgatgctccggtggctggcgcgttggtggctttttcgcaagggcgtttcggcgtggaaggctcgttatggcttggcccgttgtgcaatgggaataacagagagcagatgaccgcgttgaccgaaggtttgcgcgaggctgccgaacgggttcacgccatcagcctgacgtgctggcccaaccaggtgtattgcgttcgtgattcgcaaggcaaggccatggccgaacccaatgatgagatggtgcgggagtacgagcggctgggttggaagcatgctggctttacccgtggatacgatgccctgatgaaccgttggaattacgtcaaggacttgagagagttctcgaacgccggcgagctgctcgcttcgtatgcgaagaacacgcgtcgtaacgtcaagatcgcgcggaacagcggcgtggaggttcgacgcctgaatcgcagtgagctgaacgtgttccacgatatttgcgagctgagtagcgaacgccagcatttcgccaaccgtagccttgattacttcgaacgcgtatatgatgcgtttggagacaaggccgagttcatggtggcggaagtgcatcttgaccgctatttgcaatcctgggaggaaaagctggcgaagttctcgaaagacgtggaacgctgggagcgttcgcttgagcatacgaagtacccggatgatgtgcgcaagaagctcgatacggctcagaagaatgtggagtccgcacgtcgccgcattgaggatgcgaacgagcgcatcgctcgtgatggcgaggtggtgccggtcgccgtaggtctgttcatgtggcatgaacgcgagctggtgtatttctccagcggatccgacgatcgttacgccaagttctacgcgcccaccgccttacagcatgagatgatgtcgcgttgcttggaacgcggagtgacgcggtacaacttctatggcatttcgggagtgttcgacgatccggaagacgatggacgcggcgtgctcgagttcaagcagggcttcaacggctacgttgaggaactgccgggcgaattcacgcttccggtgagcaagctgcgctacggcgtgagcgatttggcccacaaactcctgcgccactagctttagggggtttcagccatgcttggcgcgacgcggatttgcgtggggtgagactttctggtacgctttatgtcttgtgcgcggatggcgtgtgcttccgggcattgccactttagctcagtcggtagagcggctcactcgtaatgagcaggtcgacagttcgattctgtcaagtggctccagcgccctagatgtgaaagcatctagggtttcgcatatcaggagcgttttgccccgatatggctacttgcgcgagtggcggaattggtagacgcgcaggatttaggttcctgtgtctttgacgtgtgggttcaagtcccatctcgcgcactttcagaaaacggcggaattccgccagttcttggtcattgtagtccactcaataagcctttttgagaacatgttgaaaacattttgcccgtttgcgtcccaattcttccactgactggaggatttgggacgttggggagcttgtttgcgggtggattcttccactgactggataatttgggacggtggcaggcttatttgtgggtgaattcttccagcgggtggaggatttgggacgctgaggggcgcgtgagcggagtgtttcttccagtgggtggaagaaacaggacggtgatgggcggcttggtggcaggggatgctcctaagatggcttcgggtaggaagagaaagagatgattagggattaggggagtgtcgtgtctgcgctgattcagcctgttgcgctactgctgattattctcgccggatacttgttcaaacgtgccggcctgttcgaagatcgcgattaccgcattatgcagaccattattttcaatctggtgctgccaggcgcgatcgtctattcgtttgctacgaatccgcatgattccagcatgctgttgatttcgctgttcggcctgattgttgcgttcattccgccggtcgtggttttcttgacgtcccgccaccgaccggtgcagaaccgtgcgttcatgatgttgaatggttccggcttcaacgttggctgcttctgtttcccggtggtgcaggcgtttcttggcacgggcgcgatcgtgcccgccgccatgttcgacattggcaattgcgtaatggttgccgccggtacgaatgtgatgacgcaaacgctgctgcacatcaagcctggcatgccgcttaccgaacagtatcagggcaatgcgcccacgctcccgtatgtgaagccgaaagacaaggatgccaaacgtcttgcccgcaaggcgttggcccgcaacgtgttcaagggtttcttcggttcggttccgttcgacacgtacttggtgatgattattctcacgctcgctaacgtgaagattcctgacattattgccgcgctcgtgcagccgctttcgaacgcgaattcgttctgcgcaatgctgatggtgggcatgcttatggatttgccatctggcaagcaggatgtgcttcagttgttgaaggtgattggctggcgactgccgtttggtattgcgtttgctactgcggcttggctgctgctgccgtttggcgctgagattcgtgaggcggctgcaatgtgttgtttggcgccgattgcagtgttttccacgctgtttaccgacaaggtgcttggtaatgcgaagcttgctggttttacgctgtcgattactgcgattatcagtttgctgctgatgaccggcgctcacttcttgttcgtcgcgctcgcataagagcggcaaggagatctttaccgggtgcgggagattgtttgtgaccccgcagagcacgaagtcgttgaatgcttgcttgctggtagttgcagtgccgttttcttgtcgttcactgcataatgcgatcgtttcgtttattacatgtttggaagtgttacgaagacttgcgccggaaccatgcatacgatttcagtaatcgtcgaaaatgcgcatgtcgaagacggaaggttgtcggaaccgcgctatattgcgaatcttggcgaatgtgttaactcaggaaatatttttgtgttgttctgtcttcttttgtgagtatcttgtgaggtgaagagatacggaatgcgacacgcggaaatccgcagagaagccgcaatcgcatccgcttcatagtgatgatgaaaggacctatacaccatggccatcaatcctcctgttgacgccaccaagaccccggagtgggccgcactgcagaagcactacgatgagctgcagtccgaaggcatcagcctcaagcagtggttcgccgatgacgccgagcgcgtcgagaagctgagcttcgacgcgggcgacctgcacttcgacctgtccaagaacctgatcaagccggaaaccctgcagctgttcgcagacctcgccaaggccgtcaagctcgacgagcgcaccaaggccatgtacaccggcgtgcacatcaacaacaccgaagaccgcgccgtgctgcacaccgcactgcgccgcccggccgaagacgaaggcaagtacatcgttgacggacaggacaccgtcaaggacgtgcgcgaagtgctcggccgcatctacgcattcgccgacaaggttcgctccggcgaatggaccggcgtttccggcaagaagatcgaaaccgtcgtcaacatcggcatcggcggttccgacctgggtcccgtcatggtgtacgaagcgctgaagccgtacgctgacgcaggcatctccgcacgctacatctccaacatcgacccgaacgatctggccgaaaagaccaagggcctcgacccggagaccaccctgttcatcgtcgtttccaagaccttcaccaccctggaaaccctgaccaacgctcgcgaagcccgcacctggctgctcgacgccctcaaggccgccggcgcagtcgacggctccgacgagaagaacgccgaagccatcaagaagcacttcgtcgccgtctccaccaacctggagaaggtcgctgagttcggcattgacccggccaacgccttcggcttctggaactgggttggcggccgctactccgtggacgcagccgtcggcacctccctcgccgtggtgttcggaccggaacgtttcgaagagttcctgcacggcttccatgagatcgacgaatacttcgccaacaccccgttcgagaagaacgtggtcgtgctgctcggcatgctgaacgtgtggtaccgcaacttcttcaaggtcgcatcccacgccgtgctgccgtacgaccagtacctgcaccgcttcccggcctacctgcagcagctgaccatggaatccaacggcaaatccgtgcgttgggacggcaccccggtcacctccgaaaccggcgaaatcttctggggcgagccgggcaccaacggccagcacgccttctaccagctgatccatcagggcacccagctgatcccggccgacttcatcgcgttcgtgaacaccccgaacccgaccaaggacggcgaccaggacgtgcacgagctgttcctcggcaactacttcgcacagaccaaggctctcgccttcggcaagaccgctgacgaagtgcgtgcagagggcactccggaagagatcgttccggcccgcgtgttcaccggcaaccgcccgaccacctccatcttcggcgtggcactgaccccgttcgcactcggcgagcttatcgccctgtacgagcacatcaccttcgttgaaggcaccgtgtggggtctggactcctacgatcagtggggcgtcgaactgggcaagcagctcgccaagcagatcaccccggccatctcccaggatgacgaagcactggccgctcaggacgcttccactcagtccctgatccagttctaccgcgcaaatcgcaagttctgatttctctaaggattaaatagccttcgaaagggctctgcacgggatgcagagccctttttgctacccctggccatcttcaaaaggtctggcgggtgaggtatttttgaatattgctgtgccgggattcaggacgccgcataatcctgattcccttcgggtccagccgagaacaatcgcaagattgaacggaatgttgcacaaacgcaagttaccgtgattttcggcggattggcaatccttcgcaggcagacctgcggagaacatacgaggcagaacgaaattgaaaaatcgtgaagcccttacctgtgcgctgatatgcggcggcgactcgaggaaacacaatggttaacgctattgaggcatttgacgccaagcacatgaagccggccgaggaaatcccggcattccgtccgggtgacaccgttgaagtcaacgtgaagatccaggaaggcaacaactcccgtatccaggccttcaccggcgttgtgatcgctcgtcagggcggcggcgtccgtgagaccttcgttgttcgtaagatcagcttcggcaccggtgtggagcgtcgcttcccgctgcactccccggtcatcgactccatcaaggtggtccgcaagggccgtgtgcgtcgcgccaagctgtactacctgcgcaacctgcgcggtaaggccgctcgtatcgttgagcgccgcgacaactccgagaagtgagtttcaaacgcaaataaagcgtgaaattggccctcagcctcacggcaggagggcctttttctattctagaccgctatgataggggtcagtgtgcaaaccggacgataaaggaatcatgtatgaggcatgccaaagaagaaaacaatagcggcgacagctttggcttgcgcgacaccttggtctggtgcggaattcctattattatcgtgctgctgatacgcattttcctgctcggattctacgtgattccctccggatccatgatgaacaccatcgaaccaggtgaccgcgtgatcacctcgaaactcaccccgaaagtcttcgatctgaaacgcggcgacgtggtggtgttcaaggatcccgaccactggctgcggcaggaagacagcagcaaactcggcggtgactacctcatcaaacggctcatcggattgccaggagacaccgtggcatgcgaagggccaggtaagccgatcaccatcaatggtgtggcgattgacgaaagcgcatacattcgccccgacgtggatcccagctcattcgcgttcaacgtgaccgtgaccgaaggacacgtgttcgttatgggcgacaatcgcgccaattccgccgattcacgctatcatcagggtgattcctcacatggacttgtgcctattcccgacgtagtgggtgtcggactcgcgaaatattggccgttgaaccgcatcggcgggctcgatgcgcaccatgaagtgtttgccgacgttccggaaggaggctcggcggcctgatggcggtttccgtaattcccacattggatttggaacgtgctattgccgaacaaggctacgatgtgatcgtcggctttgacgaagtggggcgtggatctctcgcagggccggtaatggttggtgcggctgcgatttgggcgcgtgacttagacgggccggctggagcttcgcaaggaggctcgcaagaatcttcgcatctggaagtgccgaaaggcgtggccgactccaaaatgctgaccgaacacaagcgcgaagccatcttcgacgaactcaaatcctggtgcgcatcttgggcggttggcgccgccagcaacaaggagattgacgagtggggcatttcccatgcactcggcgtagccgcgttacgtgcgttggcacaggcggaggcgaagctcggcattgacggcaacggcatgctctccggcaaaccggtgaaggtcggcgcgatcctcgacggaccgaacgattacatcaccaagacgctgaacaccttcgacgcgcccgaagtgccggtgccggcgaacgttaccaccaaagtgaaaggcgaccggtattgcgccgccgtggccgctgccgcggtcatcgccaaagtcacccgggatcggctcatggtcgaactgggagcgcaaccccaatatgaaccatatgaatgggcccacaacaagggttacggttcggccgcacaccgtgacgccatcgctgaattcgggcccagcgacctgcaccgcctgtcctggcacctcgtctgacatacggcatctcatccgcagtccgcgattacgctaatccttgcggatgatgcatgccggaaggaaacctgtaagttcatcccgccgtctgatggccgggaccaatccgtttccgtaccgtaggaaacatggaacacatacttcaggcgaccgatctggtcatggattattcgacccaacaggcgacaccaaacgccacacacatgctggcgctcaatcacgtggatttcggcatccaggcaggcgaaagcatcgcggtcatgggaccgtccggttccggcaaatcgacgttactgcacgcactcgccggcatcatcaccccgacagccggcaatgtgatgtttcgcggtgccaacctagcgcggttgagcgacgctgaccgcaccaaactgcgccgcagcgccttcggcttcgtcttccaatccggacaactgctgccggaactgccggccatcgaaaacatcgcgttgccgatgatgctgggcggcgcaagctaccagcaggccaccgacatggccatgctatggctggaacgattgggattgcgccagctcgcgcaacaacgtcccggcgaaatgagcggcggccagatgcagcgcatcgccatcgcacgtgcgctcgccgcgcagccggcagtcatcttcgccgatgaaccgaccggcgcgctcgaccagaccaccggccacgaaatcatgagcattctcatgcggaccgcacgacagaccggcgcggccgtggtcgtggtgacgcacgattcgaacgtggccgcattttgcgatgccaccgttaccatgcgtgatggcaggttgagctcgccgcagcaatcccaacctaccgccggaggcgcacgatgaacatgttccgattatggcgattgttccaccgctccggcacccgcggcacatccggccgcacctctgcgctggccatcgttgccttcgcatccgccaccgccgtcttcctaaccgtgctcggaggcctgcatggcttcatctggcgggcctccgccgaccacacgttcggttgcatgatcgattccaacaggtgcgctcccggtacatacgaaacatggtccaaagccctggcgcacgccgacaagctcgtcgccacggtcggcgacggccattggacggccgaccaggccacagccgtcatgaacacctattccgacggctatgtgatgctcgccgcattcgccagtctgctactcatcgtgccgttcgtggcgctcgccggctcggcggcccgtctcgcggcctcccgcagggacgcacgtctcgccgcactgcgacttgcgggcgccaccaccgcgcaggtcacgaaactcaccgcgctcgatgcgggtggccaggctctgcttggcgcgctggtcggcatggccggctacttcgcgctgataccagcgatcatgctgctcgacttccaaaaccagcatttcaccttcgaacagttgtgggtgggactgcctgccctggcggctgtgaccgtcggagtcacgctgcttgccttggtctccgcgctggccgccctacgccgcgtggccttcaccccgcttggcgtgacgcaacgtaccggacaacccatgccgtccgcatggcgcgcactgattttccttgccgtgttggccgtaggctacctgctgctcaacagcatctccgcattcgcacacttgggtcagatggtggtctacgccatcatcttcggcgtcttcttcctcggcttcgccatggtgaacgtcgtcggtacctgggtggtggcgatgcgcgccagatcgcgtgcgaaacacccgaaggacgcggccactatgattgccatgcgccgtatcctcgacaatcccaagcgtgcttggcgcaacgtgtccggcgtggcgctcgctgtgttcatcgcggggatgacgtcggtgtgcggattgctcgccaccggaatcggaggcaaccacgacccgttcgacccatctatgctgtacatgcgcgatatagcgatgggtggtttcctgacgctcgcctttgccgcggtgctcgccgccgtcagttccggcgtgatgcagacgagcaacgtctacgaccaggccgacgagtaccgcatgcttgcgttggaaggcacggatgaggcgacgctcgacaaggcacgcatgatggaagtgatcaccccgctcaacacggtgatggccgtttcattagggtgctcggtgttgttgctgtttccgattctggcaacgtcgttgctcaatccggcttcgttgcttacgttggccgcgggaatcggcttgtgttatgcgctgatggtgctcggagggtgtgccgcgaatcatgcggcgcacgggctcggtcatgccggctaccgtacggacgattgatggtctcgccgcggcggtcgtggataccgcggcgaggactggcgaggtcagccgagcagcaccgcgatgattgcgatgaagatcggtgaggtcagtgtcgagaagagaatgccgtcgcgtgcgaacgagagacccacgttgtaccgcgccgcgtagttgtagacgttctgcccggtcggcagggcggcgagcaccacgcacgcgtacaatgtggcgccgcggaagcccatcacgaaatacgacagcaggaacgcgataattggcatcacgatgttcttcaataccgccaccgtgaacaccgcgggaatattcgacttgtcctgcagcggcttcgtgccgtgcaacgacatgccgaatgccatcaaaatcattggcactgcggaatcgccgatcatgtcgatcggatcgtaaatacagtccggcaccacgaaatgaccggtttttgcggaaatcgcggatacggcgatgcccagcagcgaaccgataagcagcggctgatgcagcggctgcttcagaatctccctcgtggagaccttgcctttggtggtcacatcgagcacggtcaggccgatcggtgtgaacaccgcctgttgcatgaccagaatcggcgcgaccaaagcgggattgcccagaatgtacgtggcgatcggcagaccgatgttgttggagttcagatacagcgaattcaacgcgccgatggtggcatccgccgccttcagatggaagaacagcctattgaggatcagaaacaccaatccgaccagcacggccgagaagaacgccacaacaatggaggagtggaatatctcgaagattctctccttggacaggatggcaaacatcaggcacgggctcgatacgaaaaagctgaacctgttgagcaccatctgcgcggtaggtccgcctatgcgcatgcgcgcggccacgtaaccggtgccgatgacgatgccaatgacgcagaagccttccaatgcgcttaacagaccaggcatgacactcttcctttcgctctcggccgttggtttggccgctatccagtgttgcaccatgcatatggataacatccgatccgtctcaaaagcgttgtcgaacggcgatgtcggttccggtggtgctggataatgggcggtatgaacgaacttgagattggattttccgcttccgccactaggcaggagcagctgaacgagctgatgacccagattatgggaacctattccgtgagcgacgacgaagggccgttgaccgacgcggtcgaagcgtttttgaataaacagcagcatctgacagtgcgcaggcatggcgatacgctggtcgcatccacgaattttgggcgtgagcgtcgcgtgatcctcgccgggcatctcgacacggtgccggtgatcgacaatttcccgccgcgttggctggaaccgggcgatccgctgattcgcgaggatgttgccgccggccatgggcgggagcgcgtgatatgggggcgcggtgccaccgatatgaagggctccgacgcggtgatgatgtatttggcggccgcgttgacggatgcgaaatacgatctgacatacgtgttctacgaccacgaagaggttgccgccgaaaagaacggcctacgcaaggtggtcgaggcgcatcctgattggatttccggcgattttgcgattatcggggagccaaccgattgcggtattgaaggcggctgcaatggcacgatgcgtttcgacgtgatcacgcacggcattgcggcgcattcggcgcgtgcgtggatgggtaggaacgccatccacgcggccgctgagattctgaaccggctgaacgcttatgaaaatcgtgcgattgaagtggatggcctgacgtatcaggaggggctgaatgccacgctgatttcaggcggcaagggcacgaatgtgattcctgatgaatgccgcgtgcatgtcaactaccgttttgcccccgacaagtcgttggctgaggcgaaggcactgatgattggcgcggatgccggtgcggaattgggcaatggcgagcatgttgccacaggtggcgtattcgaaggcttcggcattgaaatgaaggacgagtcgccttccgcacgtccggggttgacgtcgccgctcgcgcagtcgctggtggaattggtgcgcgagcgcacggggcgtgagcctctggccaagcttggctggacggatgtggcgcgattctcgatgctgggcattcccgcggtgaatctgggtgcgggcagtccgttgctggcgcacaagcatgacgagcagctgccggaatcggatctgctgctgatggccaacttgcttgaagactggctgaagtagctgtctgctgcctttttctgcctcctgtttctgcctgctatcggctgtttgttgttttccgtcttctgtctgcacgagtcggatcggctgtctgcacgagtcgtaatctgtgtctgcatttctcgcgaatcgtgatttctttcgacttgtgcagacggagcaacgacttgtgtagacggggcctgggatttgcgggcggggaaagcaggcggtgagttgcaggatccggaaaatttcccgtcatgtcacgttccgttgttttttgtgtcatacttatagacggtggttctgcaaatcaccgatgcatccgatggcgttgatcccctcgcgtgaagttcatgcgtgtccgcgagcgctggtgtccgccgtcgcatgatgaggacttttgacggaagttgcttcctacgggcgccatgatgcgcggccacggtgagagcgtggtgtgagaaccgtatgaggcctaagcgtgggcggcgcgattgcagcgtgtcgtcgaggagccattgtgcctaataccagtgagggcttcgatcaggtcgaagcttcggcatcgcctgagcatgccgtgaatgttgtgaaattcgagtcggtccagtccgatcctgccccgcgtcgccgtcgtggcggtcgtcgcgtggtgcgtggcgtgggagctgccggtgcgtccttggagttgaaggtcgaggagcatgcttcggctccgctgttcgaggagccgaagttgccggttgcgcaacctgcgcatgataccggtgattccgctgattccgagggtatgacccgtccgacccgtcgccgtcgtcgtccggtccagtccgatgatgatgttcgtgagattgccgacgaacggccgacgcgttctcgtcgccgtcgttcggtgcaggttgaggatgagcaggacgaggatcgtccgtcgcgtcgtcgcagccgtttcgccgatgatgcggatgagtacgatgagatgccgcgtcgtcgcgcttccgtcgatgattcccatgatgaggagtcgtctgtggagcgtgccttggatgccgtcgatatgttgccggaaggccatgaggtccgccacaatccgcgtccgatgatgtctctgcttttccaggagccggttttgccgtccgttgcggattcccgagacagggcagacgacgatcgcgacgattcccgtaatgaccgcggcgagcgtaatgatcgcaatgcgcaggaccatgacgatgagcaggatgaggatcgtccgtcacgtcgccgtcgccgccgcaatcgcgacgttgccgacgaagagcgttccgaagacaatcgcaatgaacgcgataatcgggataatcgcaatgatgatgcggacaatgacgaggaaggcggatctcgcaagtcgcgtcgttcccgtcgtttgaacgcgcaggagcgtcgtgccgcagctgaagtcgaacagatcgaagaggatttgatcctcgacgatattacgtatgcgccgattgatgacgaaacccgcaatcgtcatgacgatgatgacgacgagcagccgacgcgcacccgtcgtcgccgtcgcagccgcggcaatcgtgaggaagccgacgaacagcagcgggatagcgatgaaggcgagtcccgtcgtcgccgtgaggacgatgacgaggatgaaggcacggtgacccgtcgccgtcgtcgccgtcgtggcggtgcgaagacggatgagacggaagagccgctcgtgcgtcgttcccgcaagcagcagtacatcgacgagatcaccgacgtcgaaggttccacccgacttgaggccaagaagcagcgtcgccgtgacaatcgccgtgagcgcagccgtcaaagccagctcatggagcaggacttcctggctcgccgcgagcatgtcgaccgcctgatggtggtgcgcgaacgcgaacgccacacgcagatttccgtgatcgaagacaatgtgctcgtcgaacattacgtgtccgacattcaggaagtcgccactgtgggcaacatctatctgggccgtgtgcagaacgtgctgccgagcatggaagccgcgttcgtcgacattggtcaggcgcgtaacggcgtgctctatgcgggtgaggtgaactgggattccgcacggttggaaggccagcctcgccgcatcgaactcgcgttcaagtcgggggacccggtgctcgtgcaggtcaccaaggatccgatcggacataagggtgcgcgactgacctcgcaggtcacccttgcgggccgtttcctggtgctcgtgccatccggtggcatgacgggcgtgagccgcaagctcagcgagcgtgaacgttcccgcctgaagaacatcgtgtcgaaggtcgcgccgaaagacatgggcgtgatcattcgtaccgcagcggaaggcgcctccgaagaggcgatcaccaaggatcttgaaagcctggtgcgccagtgggaacgcatcacctccaagcgagacgaattcctgcacggcaagcgtccgaagctgctgcaaggcgagccggacgtggcgatccgcgtggtgcgagacatcttcaacgacgacttctccaagatgatcgttgaaggtgaccgcgtgtacggccgtatcgaggaatacctcgacaccatggctcccgacttgaaagacaagctcgaaaagtgggatccggccgaacatgaaggcaaagacgtgttcgacaagtggcagatcgactcccagctgcgcaagggcatggaacgtcaggtctacctgccgtcgggcggctcgatcgtgatcgaccgcaccgaagccatgaccaccatcgacgtgaataccggccgtttcatcggccgcggcaagagtcttgaggagacggtgacccgctgcaacctcgaagcttccgaagagatcgcacgtcagctgcgcctgcgtgacatcggcggcatggtgatgatcgacttcgtcgacatggtcatgccagccaaccgtgatctggtgctgcgcagactggtggaatgcctggcccgcgaccgtaccaagcatcaggtggccgaagtcacctcgcttggcctggtgcagatgacgcgcaagcgcatcggacaggggctggtggaagccttttccgaggaatgcccgacctgcaaaggccgcggattcattcttcacgacgagccgaccgtgtccgcggattatgacgatccgtacgccctcaagggcggcgacccgttcgtcaaaaccaacaagcatggtcacggcacggacgtgcaggtgccgaaaggctcctcgccggacgtgaaggccaaactcgcgcagatcgcggcggctgccgtggccgccaacaatgcggaactgggcgaggaagcatagaagaataaatgattattccggtctgtcaacctgacacgccggaaacagacttgcggttgtacgcgggtatgtgtaaattagattgctggtgtctggccgcgaggctcgaacgtgccgggcagtaagctttccaagttaataaaggaacggatatgtacgcgattgtgaaggccggcggccatcaggaaaaggttgaggtcggtgacgtcatctacgtcaaccgtctcgaggctaagaagggcgaaaccgtggaattcccggttgctctcgttgtggacggctccaaggttgtcctcggtgccaaggatctcgccaacgtcagcgtcaaggctgaggttgtcaacgatgaggccaagggtccgaagatcagcatcatgaagtataagaacaagaccggcgttgctcgtcgcaagggccatcgccagcagctgaccgctgtcaagatcacggctatcgcctgattggcgcagggttagagtcaaggaccgaaaggaacagacatggcacataagaagggcgcgtccagctcgcgcaacggtcgcgattcaaacgcgcaatacctcggtgtgaagaagttcggcggcgaagccgtcgtggccggcaacatcatcgttcgtcagcgtggcaccaagttccacccgggtgagaacgtcggcatgggcaaggaccacaccctgttcgccctcaaggacggcagcgtgaagttcggcgtgcgtcgtgaccgcaaggtcgtcgacgtgattgccgcctgaaatacgcgcaattaacgcttacaagataaagccgcgcccgttatggacgcggcttttctttattttgatgattgctgaggattggtttccttcagcccgtcccaaacgtcacgtaacgttgcatacagttgcataagacatatcaaacggacaataatcggaccgtttcgaacaaacgattaaggtagatacatgagtgatttcgtcgatcgcgtgaccgtccatgtgaagggcggcgacggcggcaacggttccgccggcatccgtagggaaaaatacaagccgttggcgggaccgaacggtggcaacggcggtgatggcggttccgtgatcttcatggccgaccagaacgccaacagcctgttggattaccgtttcatgccccaccgcgaggctggaagcggcaccatgggcttgggagacaccaaagacggttcgaaaggtgccgatctgatcctgcccgttcctgtgggcaccgtgattttcgaagccaaagggccgcaaggcaagcctaagcatccgggcgagcagctcgccgatcttcgccatgccggagacaagttcgtggtggcggccggcggcaacggcggtcttggcaacgccgcattggccaaccgcacccgtcgcgctccgggattcgcgttgcttggcgaaccaggcgaggaacgtgacgtcattctcgaactcaaatccatcgccgacgtggccttggtgggcttcccctccgcaggcaaatccagcctgatcgcaggcatgagctccgccaagccgaaaatcgccgactatccgttcaccacgctcgtgccgaacctcggcgtggttatggccggagacatgcggtacaccatcgccgacgtgccgggcctgattccgggcgcatcccaaggcaagggcctcggccttgaattcctgcgccacatcgaacgcaccgaaatcatcgcccacgtcatcgactgtgccacgctggaacctgaccgtgatccgatgagcgactacaaggcgctcgaacatgagcttgccgaatatgccgacaagctggaactgccgttgggcgcaatcccaatccccgaacgcccccgaatcatcatcctcaacaaggtcgatatgccggaagccaaggaattggccgaattcgtcaaaccggaattcgaaaaactcggtctcaatgtgtatgtcatctccaccgcatcccacgaaggtttgaaggaactcaactgggcgttggcggccatggtcgccaacatgcgcaaggaagtcgccgaacgcgaacaggccgaagaagaagcgcgcgtggtcatcaagccgctcgaagagccgcgcaaccgccgtcgccgcaacgacgaaggcggcaccgcgcttgacttcaccgtggaacgcaaggaagccggcaacggcgacgtctggtacgaagtgctcggcaccaagccggaacgttgggtcatgcaaaccaacttcgacaacgacgaagcagtcggctacctggccgaccgcctcgccaaactcggtgtcgaagacgagctgcgcaacaagggagccaagcctggcgacgaagtacgcatcggcaagggtgcgcgagccgtggaattcgattgggatccgaccattgctgcgggcgcggaaatgctcgacggcgcccagcttggcgcacgaggcgtcgacctgcgactgcaggaacaggacggccgttcgcagcgccgcaccaacgcggaacgccgtcgccagtaccacgaaatgatggatgcgcgccaagccgtgcgtgaagccatgatggccgaacgcaaggccggacactgggccgatccttccgtggacgacgaccgccatgacgaaaccagcctcttcggacgcggtgaaaccaccgattccgaaaacgtggaacaatagaagcagcaaaacgcccgctgatgtgccgattggcatgtcggcgggttttcttttcggccattcgaacgcctggaggaaccatgaacacgccatcgcaagcccaagtgcgccgcgccatcgccgaagcgcaaaccatcgtggtgaaagtgggatccagctcgttgaccaaaccaagtggccacctcgatccggaacgactcaacgcgctcgtggcggccctcgcacgcgtgcgactcatgggcgggcgcgtggtgctcgtctcctccggcgccatcgcagccggattcggctccctcggcttcgactcacgccccaccgacgtggctgaccagcaggcgtgcgcggccgtcggacaaggcctgctcatggcccaatacgagaacgctttctcacaatacggactgcgcgtcgggcaaatcctcatcaccgtgtccgacaccatcgccccacagcaataccgcaacgtgcgacgcaccctcgaccggctgctcgacctcggcgcggtgccgatcatcaacgaaaacgattccctcgcgtccaacgaaatccgtttcggagacaacgaccgactctccgcattgatcgccaacatcgtagtcgccgacgctttggtgctcctcaccgacgtggacgcgctctacacggcacccccaagcgaacccggatcgcgacgcatcagctacgtgccgaacgtggaggacgcgctcgccaaagtgcaggtcggcggcaccggatcaaacgtgggtaccggcggcatggtcaccaaaatggaagcggcgcgtgttgcggcggtctccggcattcccgcagtgctcacctgcgcggcaaacgcaggcccggccatgatgggcgacccagtcggcaccgcattcgcccccatcaacgaccgtggatcatcacgccgactatggatcgggttcgcagcacacccgcaaggcacgctcgtggccgatgccggcgcttccaatgcgatacgcggaggggccgccagcctgcttgccgccggcgtactcgaagtgcggggcgattttgccgccggagacgcggtgtggatcgacgatgaagcgggcaatcacctcgcaaaaggcctcgtaggattcgattccgaagaaatcccgcaaatgctcggccgcaataccgcccagctcaagcgtttcctcggcgaagaatacgcccaccccctagtccaccgcgacaacctcgtcttggtttaatccctttccctcttttgttcggtgccctgtaaatagtaatatgccgcccctaccggtcagcagggaaaaggaattccaaaatgtgctaaaaggctgttgtttttcgggcgggagggatagcatggcaaacatgactatggctgactggcagactctttccgaacgtattaaccgcgtggctccgagcgctactctggccgttgattccaaagcgaaagcgatgaaagctgaaggaatcgacgtcattggatttggtgcgggcgaaccgaactttccgactccggctgcgatcgtcgcggctgcggccgaagcggtgcaggatccgaagaactatcgttacactccgacggcaggtttgccggaattgcgcaaggcgatcgcagacaaaacgttgcgcgactcggggtatggagtcgatccgaatcaggtgatcgtaaccaatggcggcaagcaggccgtgtacgaatcctttcaaatcctgctcaatgatggcgacgaagtcatcattccgacgccgtattggacgagctatccggaagccgtgaaactggctggaggcgtgcctgtcgaagtgttcgcgggagctgaccgcaatttcgagccaagcttggaagacctggaagcggcacgtaccgaacgtacgaaggccatcatcgtgaatacgccgaacaatccgacgggtgccgtgtggaatccggaaaccgtcaaggcgatcggcgaatgggctgtggaacaccatgtgtgggtgatctccgacgaaatctacgagcatctgaactacgatggtgcaaaaaccacgtatatcggcgctgcagtgcctgaagtgcgtgatcagctgctggtgctcaacggcgtggccaaaacctacgctatgcccggctggcgtgtcggctggatgatcgctccgctcgacgtggcgaaggccgcatccaagctgcaggggcatatgacgtcgaacgtgaacaatatctcccagcgtgccgcgatcgcagccgtgtccggatctcttgacgccgtgtacgagatgcgtgaggcgttcgacaggcgccgtcagaccatcgtcgccgcgttgaacgatatcgaaggtgtgaactgcccgacgccgaccggcgcattctatgcgttcgccgacgtgagcgcactgctgaacaagccgctcggcaccagcaaaaccgcttatgcgagcacgtccgaactggctgcggcactgcttgacgaaggtcatgtggcggccgttccaggcgaagcgttcggcgctcccggctacttgcgattctcgtacgcgcttgccgacgacgacctcgttgagggcatgaagcgtatgaaacagtgggtcgaggactgatactggcctgactgagacttttcacacgattcgcaccgcggtgacatgccgggtgcgaatctttttttcgttgaaaaatagcggttttgggacatttcttgaaaaaccggttggactaagtcgcaaatacccgctattatttcgacttggcggttttgccgcttacttcttgcgtggtttttcgcacaaaatcctcgccagcaagtagaaacggcagagtacacctagggaagtggcgcaattggtagcgcaacggtctccaaaaccgtaggttgtgggttcgagtcccgccttccctgccaagcttcttacaacaagctcagcggaggattattatggcgaaggcaaaaaatagcgaaaaggccgttaagccgaacatcttcatgcgtcttggcttgttcatcaaacagattatcgacgaactccgcaaggtcgtgaccccgaccagcaaagagctgttcttctgggcactcgccgtgttcatcttcgtgctgctcctgatggcactggtcaccggcatggacttcggtctgggcaagctgaccctgtggatcttcggctgatcaacgacttgaaggtgaaactgcatgactgacgaagtgttttccgacaacctcgacgaagctccagaagctgatctcgaggccgtagctgccgttgaggagctgcaggccgagggtgaaagcgttccggaagtcgctgaggccgagccgactgctgaagctgcttccgaagagtccgcggaggacgagggcggcgaagagctggatgctggcgccaaggccgtcgaagacttctccaacagcctgcgcaccctcgaaggcaagtggtacgtgctgcacacctactccggctatgagaagcgtgtgaagaccaacgttgaatcccgtgtggcaagcttcggcatggaagataagatcttccagattgaagttccgatggaagaagtcgaaaagcacaccgaaaagggcaagaaggtcatcacccgcgtgcgtgttcccggctatgtgctgattcgcatgcttccggatgagaacgcccgtcgtattgtgcgtgaaaccgaaggcgttaccggcttcgtcggtccgaccaaggaaccggcgccgctgagccgcaaggaagtcgtctccatgatggctccgatgatcgcttccgaagcgctcaagaaggctggtgacaagccagccgccaacaagaagcgcgtcctcgaagtctcttacgccgttggcgatcaggtcaccgtcaccgatggtccgttcaccaccatggccgccgttgtctccgatgtcgagcccaccacgcagaagcttacggttctggtgtccatcttcggtcgcgacacgccagtggagctgggcttcaaccaagtagagaaattggcttgataagtctttgaaagaccccgcgtttgcggggtctttttttgtctggcggagtgggcataataggaaagcttgtgtctggagggcttattgtgcctgaatgagggcgcggaacctgctagcacagcacagcaatatacgttgcggaaggaatcggacgcgggaaacctactccggtgccgctaccaccgcttctacagaaagaagaaccatacaatggctcctaagaagaaagtctcggcgcttctcaagctccagattcaggctggcaaggccaacccggccccgccgctgggcccggcactgggttcccatggcgtgaacatcatggacttctgcaagcagtacaacgctgctacgcaggacaagatgggtcaggtcatccctgttgagatcaccgttttcgaagatcgttccttcaccttcattctgaagaccccgccggcagcagatctgctgaagaaggctgcgggcatccagaagggtaccgaaaacccgctgacccacaaggtcggctccgtcaccaaggctcaggtccgtgagatcgccgaaatcaagatggctgatctgtccgcacgtgacgtcgaagccggcatgaagatcatcgagggcaccgcccgctcgatgggtatcacggttaccgactgagaggagagggacaaatggtaaagcgttccaagaagtatcgcgaagcggctgaaaagatcgatcgcaacaacctttacaccgccaacgaagccatcgctctcgtcaagagcatgccggaatacaagttcgatcagaccgttgaggccgtgctgcgcctgaacgtggatccacgcaaggccgaccagctggtccgcggctccgtcaacctgccgaacggcaccggtaagaccgccaaggttctcgtgttcgcccgtggcccgaaggccaccgaggctctcgaggctggcgccgacatcgtcggtgacgacgatctcgtgcagaaggtcgccgacggcttccttgacttcgattccgtggtggctaccccggacatgatgggcaaggtcggccgcctcggccgcgtgctcggtccgcgtggtctcatgccgaacccgaagaccggcaccgtgaccatggacgtcaccaaggccatcaaggacatcaagggcggcaaggtcgacttccgcgtcgacaagaacggcaacctgagcttcctcatcggcaagctctccttcaccgagcaggctctggacgagaacttcaaggctgttgccgacgaagtcaagcgtctgaagccgtccaccgtgaagggccgttacgtcaccaaggcgaccatcacctccacgatgaacccgggcgtcccggttgatccgacggtcatcgcctgagcgatatagcttgcatatagtttctatatagcttgcaaaagacccgcatcctgcctcatcgcgagatgcgggtcttttcacatatatcttgcgattatctatctcatttgtaaaaaagattctgcaatcatctgaatatcaaagaaatttgagcaggtcagatatcagatatattcaaaaaaaataaatagaacagtaaaaacgatttcaacggtcgcgcatacggccaatcgcaagcgccgtcgtcaaaacgtatgcgtcacgcgggtcggtcgcatcccaaccggtcgtttccgcggcacgcttcaaacgataacgcaccgtattcggatgcacattcaattccttcgccgtgttttccaacgaactgccgttgcgcaaaaacgtggaaaccgtcacaaacgtcggatcgtcgggattctcgccatgaagcacctgatacacgttccgatacaactcttcacgagcgtaatcatcgcccaacagcgcccgttccggcagcaactcatcggcacgcaacgggcgggacggcgacgccaaagcgggagccgcctgcaaggaaaacagggtttcacgcaacacgtgcgaagcgccggcgacaccggaacgcaccggactcaaatacaccgattcgtcatctttgaaagcgggcataatcgacgtgcaggtcacttcggcagtggcggcgccactctgacagacaagcaccagcagaaaactgccgtatgtgccaacaatcacatgttctccgcccagatcgcgcaccgccttacgtgcaacgagcgaagccgaagcgggactcgtttccggtgtgccgccaatcgcgaaacaatcgaaatccccacgccaaccaagcacattcatcaacgaggcgacgcgatcatccgtaagagaagtcatcaggcattcgaaagcgagccgttcgatggtcgaatcgtcggtgtgccctgccagaaggtcgagaatgtctgcctgatcggagttcataagcgtcaagtgtagccgcccaactggcgaatcgctgaacggaaagcgtcaacgaggtgaagttcattcggggagtgccgctattatgccgcttatgagcgaagtcaaacaaactggaaagcgtggcgagcgtatcggcatattcctcagctggatgctggccgtgctggcatgcctttgggtggcatggtgttgcgcgatcgggccgttgtattggttcggcgatgggctttccgacttcggctggctgaatgtgctgtatttggtggtcgctttcgcgatatggttttcgatagttgtcgcattggtcagattcggccgcggccgtcgcgtacttccgcaatatttcgcacgacggcatgaaaaactatgcaacgagattgcaggaacgccgaccaccgtgcttggcattatgttgcgacacttgcatgatgccgcgcacagccgcccagggcgcgccctgcatgcagtgatcgtatggacggggcgcaaactcacccgctgcaccgactgttggtggaaactcatgctggtgttcgtaatcggctggctgtggattccaaccacgctattggccgcgttcggcgccgacattcgctcgcagatccgtgaattcagctgggccttgaaccagtggacgggcttgaaacagccatatatcggcttcttctcgttcgtgcccatggatatttacccgaccgcgcattacatgtggccggacaatcccacatatctgaccgaccagcacaatgtcgtgctcaccgtgttctacggtgctgcagcggcggtttcgcgctacttcaccgactccaacgatgcgggcatcgtggtgctcgcagccttgcaatggctgttcgccgcattctgctgttcggccaccgccaaccggttcttcaacctgccgtggcgcaggcttggcgtcggcacgttcgacttctcgcatccggaacgccacgattgctggaatatgcgagattacgcgcatcctgaagcaggcgttgtggcacgcccctccagactgcgggccggcgcgaaaacacgattcatgatactgctgttcttcatggtgtgcccgcttgcggtattcgccacgatttccctgacgaaatcgccgctgttcgctttcgcattcgtatggtggttcggcgtgtggtacgaactgcacatgacgcatatcaaagcgctgcccaccatcaacggcaagccgacgcgcctacgcaaacgctcgatcatggccttcaccatctcaagctgcgtgatgctgatcagcgcgaaatacgcgtggtacatcattctcttcaccttgatcctggcacttatcaacgatcgtaaacgttggaaaacctatcttgtggcacttctgctgccaaccatcctcattcatggcggcatcgtgttcctcaccaacacgggcgccatcatcggcggcgaccccatcgaaagccgtggcatccaactgcagcagatcgcgcgcgtcgccaaatacaatccgaaaggcattccggcggacgcggcgaaaaagcttgaaccggtcttcaacctcgaccagatggccgaagcgtacttccggcaggacgccgacccggtgaaatcctccggcatccaatcgaagaaagtcagctacaagtggcgcaccgtcaccgaagacgacatgaaaaacttcaacgaggcctggcttgaaatcgttgtcgcaaatcctgttatcgcactcgacgcgtttttcgccgaatgcttcggctatttcgacgtgaccgacctgccatacgtgtcgatggactactacgtgaacaacgattacgtgcagaacgacaatgcgtggatccacctgtataacaacgattggcgcgatgcggtggccggcttcgcgaaaggttggggcaatattcccgtgatcggctgggtgacgcacggcaatctgtacgtaacgctgatgctgctggtcggcgctgccgaagtggtgttgcggcgatggcgctcgctgtcatggcatctgcccctgctgctgctcatgggcgtgatgatcaccgctccggccaacaatttcgaacggcatatgctaccggtcgcgttcgtattcggtttcgtatgcctgcaattctggcgcgagtcgcgtaatgcgcgattggctgccagcgcgaacgtggccagtgcgcatgaggccagccaggtgcggcaggacgagtagcggctgcgttggctgctgcatgagctgttgcgttgcggcgacattgcgtcggcgcgccgcgctgtagtaagtaggcggtaatgatggcgattttggattcggctgtgatcatgccgcgtacatgcgttgcggcggatcaggtgcttgttctggatacggtgggatccaccaacacgtatgccgcggatttggtgcgtgcaggtcggctgttcggcatggatggcatggacggcattgcagggaacctcgtgtggagcgggcgtgagatcgtggttgtcgcggcgaacgagcagacggccggtcgcgggcggctcgaccatacgtgggccagtgtgccgggggagtcattcatcgtgtcgctggtggtgagcgtgccggttgcgattgtgcgcgattcgtccgtcaatggttggctgcagatgattgccggttgcgagatgcgtgaggcgattgttggtgcggtatgcgatttcggcggcacgctcgatgaagatgttttgctgaaatggccgaacgatatttttgcgggcggcaagaaacttggtggcgtactcgctgaaatggtgccgattccggattgcggggatcgcgttgccattgtgatcggcgtcggtttgaatcttgccgtcgctcaggaacgattgccgatagataagtccacatcgttgcagttggttgcgcgcaatctgcctgatgcgatggtgttgcgcgatgcgattgccgtacgttgggtgcaaggattgcgctcgcggttggctgattttgaagaggaccctcaccgtgaggctgtgcgcgcccgggaagcgatgaccccgatctgctggacgctcggcaagcagtgcgaggctcattttgtggacggaaccactttgcagggcagggctgtcgcgttaaacgacgacgcctccctgaccattgaggatcaggaaggcgtattgcatcgggtgagcacggccgacgtaggcgtgctcagtaagtcaaaaattacttgattgctgaaatttgccgcaatctcacttcagcttggcaagacctgcgaccacggcggaagcgataacggccttgaccgcatcgcctgcgacgaatcccatggaagccacggccacaatcggcagtgcgatgccggtaatggcggactgcacgatgaaaccaagcagatagtcaagcgcaatgcagccggcgacacaggcaaacaggtaacgtgcggcggtcagcgcgccatgcttcagcgaatcggtgcgcgccttacccttcagcagcgacgtgacgatggccgccggcaggaagccgatcaggaagccggcgctcgggccaaccaatgccatggtggaagcgccgccggcgaacaccggcagaccgaccgcgccggctgccagatacatgagcatcgcggcgccggcctgcttccacggcagcatcagcgcggccagcatcaccacgaacgtctgtagcgtgatcggcaccggcgtgcccggaatcggcacggcaccggccgcggaggcggtccacatgagcacggcgaacagcgccggcttgaggatggatccgacagcgccgctggtggcggttttcagcgtggttttgagtgtcagcattgcgttacgcacgataattctccttggatgtgattgcattacgttgatgaatcgacgattgttgacagccgaaatgatggcaagcgcgaaagtgacgaaaatgcaaggtttgtcaacttatgcccccaatcgtatgcttgccaagtttcggtaacgtttgtggagccttacaaaaagattgcgtgtcttttgtgggaaacgagttcacgatttttcgttcgcgcggccaaacttgacgttatgcctaaaaatgtcaacaaacttctggtggcgaatcgcggcgaaatcgcgcttcgcgtagtgcgcaccgcccgtgagatggggattcccacggttgcggtgtacgcggagcaggatcgccatgcacaatacgtgcagatggctgacgacgcatatctgctttccggagacacgtataaagacacctatctcaacgaggatctgctgatcgacattctgcagcgcagcggtgccgacgcagtgcatccaggctacggattcctttccgaagtggccactttcgcgcagaaagtgatcgatgcgggtgcggcttgggttggtccgaatccgaaagccctcgtggatttgggggataagatcaccgcacgtcgtgtggccacgttcgccaaagttccgccggttcctggcatttcccagtcgatttccgacatgcgattgctgctggatttcgcgcatacgcacggttatccgctcatgcttaagcgtaccgatggcggcggcggtcgcggcatcacgctcgtgcacaacgatgacgagctgcgcggtttctacatgaatcatgatgcgctgcagggcggtgatctgaacgaatatttcgtggaacgattcatcgacaaaggacgtcacgtcgaaacgcagtgcggccgcgactcgcacggcaacttcaccgtgtattccacgcgcgactgctccgtgcagcgccgcaatcagaagcttgtcgaagaggcgccggcaccattcctttcctccgaggtgactgaccagctggaaacctactctcgccgactgttcgaagccgtcgattacgaggggcttggcacctgcgaattcatggtgaccgaacagggcaaagtgtacttcctggaagtcaatccgcgtctgcaggtggagcataccgtcagcgaggaggtctgcggacttgacctggtgcgcgagcagctgaccatcgccaacggtggggaactgaccgtgaaccatccgcttcgtggacacagttttgaactgcgcctgacctgcgaggatccggcgaagaacctcgcgccaagctccggcacgctggcctcgttgcgctggccgtccggcccgggcatccgtgtggattccggcgtggtcgaaggcgacaccatttcgccgaaattcgattcgatgatgggcaaactcgtggtcaccgcatctgaccgagcggcagcagtggcccgcgtgcgccgcgccttgagcgagctgaaggtggaaggcgtgccgactccggcaagcttgttcgaacagattttcaacgacgacgaattcaccgccgaacacggtgttgcatacgatgtcagcaccaaatggctggaacgcaagtacctcaacaaggaagccgcatcatcgcaaggcgggcagccggcgtccatgtctggcgcttccgaggccgacaagaaggaatccagcgaaaccttcgtcatcgaagtcaacaatcgcagagtgtcgctgaccgtgccgaacgacatcgtcgccaacctgacgggcggtgccaaagcacgtgacgcgaaacgtgccatccagccgctgcgtgggcagggactgcatcatgcgcagaaaaaacagcaaggcaatgacggccaatccggtgtgatcgcaagcccgatgcaggctgtcgtgacgcgtatcaatgtggccgaaggccagcaggtggccaagggcgacctgctcgtcgttctcgaatccatgaagatggagaactacgtgtatgcgccggtcaagggagctgtcaccaagattttcgtgggacccgcggcgggagtggaagccggcgaaacattgatgaccatcgacgtgaccggagcgagcggtacgaaagccggcgaaaacggcgcaactggcgctgctgttgacggaaccgcaaccgacggaactatggaagggggtaagtgatgactgatatcatcgcaagcccggccgtcaaagaagcagtgaagatcgtaatggaacagcaggagcgactcggcaaaaacgcagccgaagccgtctccgtggccacaaccgtctccgcggccgacctgccgggcgcatcccagccaatccgcgcatccgtgcttcgtgcggcgcaactcgcgcacgaagcggaagatcatgcccgcaatcgccagcatgtcaaaggcaaactgacggcgcgcgaacgtcttgacctgctgcttgacaccggttccttcgaggaaatcggacgattctgcggcggcgacatcaacggcggacgcgcgggagcggcggtcatcaccggtttcggcgaagtgttcggacgcaaagtggccgtatacgcacaggacttttccgtgcgcggcggcacgctgggagtcgcggaaggccgcaagatctgccgattgatggacaaagcgctcgacttgaaagtgccgatcatcgcgcttatcgattcgggcggcgcccgcattcaagagggcgtggccgcgctgacgcaatacgggcatctgttccgtaaaacctgcgacgccagcggtttcgtgccgcagctctcgctgattctcggcccatgcgcgggtggagccgtgtactgcccggcactgaccgatctgatcatcatgacccgtgaaaattccaacatgttcgtcaccggtcctgacgtggtcaaagcggccacaggcgaagtgatcagcatggacgacctcggcggcggatacgtgcacaacgccacctccggtgtggcacactacctgggcgaagacgaagccgacgcgatcgactacgcacgaaccgtgctcgcctacctgccgtccaactccgacctgcagccgcccacctacgcgtacgccgcaacccgcgccgaccgtgacgtggccaagcgacttgccaccatcgtgccggacaacgaccgccagccgtacgacgtgctcgacgtgatccgctgcatcgtggactacggcgaattcgtgcaggtgcacgagctgttcgcaagctccgcagtggtgggattcgcctgcgtgaacgggcatccggtcggcattgtggcaaaccagccgaacgtcaacgcgggcatcctcgacgtggattcctccgaaaaagtggcacgattcgtgcgtctgtgcgacgcgttcaacctgccggtcgtcaccttggtggacacccccggatacaagcctggcgccgaacaggaacatgcgggcatcatccgccgcggcgcgaaagtgatctacgcctacgccaacgcgcaagtgccgctggtcaccgtgatcctacgcaaagccttcggcggagcctatatcgtgatgggatccaaagccatcggagccgatctcaactacgcgtggccatccagccaaatcgcagtgctcggcgcggccggagcggtgaacatcatccaccgcaaagacctgcagaaagccaaagacgcaggcaaagacgtcgaagcgctccgagccaaatacgtggccgactacgaacgcaccaccgtcaacgcgaatctatcgctggaaatgggcgaaatcgacgccatgatcgaccccgagcaaacccgcgaaaccatcatcgaatcgctcaaactgctctccagcaagaaacgcgtgcgcaaaaccaccaaacaccacggcaaccagccattgtgacgggcacgaagtgcgcggatgaatcgtaagcaaacgtaaacgcaagaacacatcgcaagatttttgaaacaagtaaggaacatcatgaacaccttttttcttgaccgactgaacagcgagccgcacgcactcgccttcgcaggccaatccaccccatggccggtgacgctcgccgaccagagcgccaatccggtgctcgacgaagccctgcatacccacgccgacgcagcccaggcactgctgtacccggtgtcagccgacctgctcgccaccaccgggcgcccggtcgacctgtttggattcgaaccgaatccggcacgactcggcgctgccgcagcggcttccgccagcgttccgggcattgctctcgctcagttgggtgcgctacttgacgctgcttccctcggctacaatcccgccgttgccaagccggttgccgtgctcggtcactcccaaggcgtgctcgccgtgcacatggtgcaggcgatcgtcgaagcgggttccattgaggcggcttccgcgcaaatcgatgaaattcttgcgattgccacgctgatcggcgttgccggcacccgtcaggcacgtcagcttggccttgccgcacgtcacggcgaagccacgccgatgctgtctgtcaaggacatcacccgcgcccaggtggatgcgctgatcaagcgtgtttccggtgcccgaggcccgatcgccgtggcagtcaccaattccgccacgcattatgtgctctccggctacccggaggatctggccgcgttcggcgtggaagtggccaaggagcacaagcaccaggccaagctgcgcgaagagaaggtgcgtggcggtcgcgtgttcgaaccggtgctcgaataccttgacgtgaccctgccgttccacagcccgcttatggccgaggctgtttcacaggctgtttcatgggcggaatcctgcggaatcaacgccgaccacgctcgcgagctcgccgccgaagtgctgctcaaccatgtggattgggccgcccgcgtgcgtgcgctcatgaaatccaccgatccgagcgccctgtgggtgttggactttggcccgggaaccaccgttggcaagctgttctccaccgttgcccaaggcactggcgtcggcgtggtggaagcctccaccgtggccgatcgcggcgaactctccacgctggaaaccctgccggagcgcacccagaactggacccgcttcgcaccaagcatcatccacacctccgccggagacaaggtacgcaccgcattcaccgaactgaccggcaaagcgccggtgctgctcgccggcatgaccccgaccaccgtggaaccggaaatcgtggcagcggccgccaacgccggctactgggcggaactcgcaggcggcggtcaggtgaccgccagcgtgttcgaccgtcatgtcgccaagctggaagaagagcttgaagaaggccgtaccgttgaattcaacgcgatgttcatggaccgctacctgtggaatctgcagttcggatcccagcgcatcgtaccgaagaagcgtgccagcggcaccccgatcgacggcgtggtcgtgtccgcgggcattccggaacttgacgaggccgtggaactcattcacactctcaacgccgacggattcccgtacgtgagcttcaagccgggcaccgtcgaccagattcgccaggtggtgcgcatcgccaaggccgtcgctccggtcaaggtgctcatcgaagtcgaaggtggttccgcaggtggacaccattcgtgggaatcattggacgatctgctgctgagcacctatgccgaagtgcgtgaacaggccaatctggtgctcgtggtcggcggtggcatcggcacgccggaacgcggagccgactacatcaccggcgaatggtccgccgaatacggtcgtccgctcatgccggtggacggcgtgcttgtcggcaccgccgtgatgaccgccaaagaggcgcacaccagccctgaagtcaagcagatgctcgtcaacaccccaggcattcccgccaagggagcagacgtcgatccgttcgctccgctgggcgaacagtgggtgccgagcggccaagccaagggtggagtcacctccggcctgagccacctgcatgccgatatttacgagctggaaaactcttccgcgcgttgcggacgcctgctggtgcgcgtgatgaagcatccggaagagctggaaagccgccgtgaggaaatcatcgatgcgttgaacgccaccgcgaagccgtatttcggtgacctgaaggccatgacctatctcgcatgggcgcagcgtttcgccgatctcgctttcccgtgggtagatgaaacctatgccgatcgcttcctgcacttgctacagcgtatcgaagcccgcgtcaccacgaaggaaagcggcgaattcgcatcgctgttcgcatcccgtgccgatgtggaatccgatccgcatgcggccatcgccaagcttgccgaagcctatccgcaagctgatgaactgaccgtcaccccgatggatgaagcttggttcccggtgctcgtgcgtgaatacccgaagccaatgccgttcgtgcccgtcatcgacaacgacctgctgcgttggtggggtcaggatcagctgtggcagtccgaagactcccgttactccgccgattccgtgcgtattattcctggtccgatctccgttgcgggcatcaccaccgttgacgaaccggtcgccgacattcttggccgtttcgaagaggccatggtcaagcgcgtttccgccgaatcgccaagcgcagacaaaaccgcgtttgcccagctcggcgcggcatcttccgcagaagaattcattcgcaaatccccgaacatctcgtgggtgggccatctcatggcaaacccggcgtacggtaccagcaacggtgacgccaactacgaaatccgcaagatttccagcgaaggaagcatcgaaaagtacgatctcgacattcatctcgatacctactgggacaacgatcctgacggtggcgcatccaagcacgccgtacgcgacatcgtcattccgctgaacgtggacggcaacgaatccgggctcttcccggtggtcgaccgcgaccgcctgccggaacacgtgtaccgcatgcttgccgacaccgcgggcatcggcaataccgccatcaccggcgacaagctcaccgccatgcccgttattgagcaggtggcagacaaagccgcccatccgttcggacaggcgcataccagctacacgctgtccgccaacctcggcttcgaccatgaagcggccaccggcggcgcgctgccgagcaatctggtgccgtcgcgcatcgcaccggacgcactcgtcggaccggcatggcccgccatctacgcggccctcggatccgtatacgtcaacggcttcccggtgatcgaaggcctgctcaacgcagtgcatctcgaccatctcatcgaactggaagtcagcgaagacgagctgctcaagcacactggcgaacagatcgcactgaccagctgggccgaaaactacttcgaatcggcatccggccgtgtggtgaccatccacgtcacccacagcgcacaagacggcaccgtgcttgccaacgaaaccgagcgtttcgccatccgtggccgcgcatattccgacgcactgccgccggaagcgccggactacggcggaatcgaagcggaaatcgaaagcactccgcgccgactgctgcgccgcgtcaaggtgaccgctccgcacgagatgaccgccttcgcccgtacttccggcgatttcaacccgatccacacctcgcatcgtggcgctgccgtttccggtcttgcggcaccgctcgtgcacggcatgtggctctccgcaaccgcgcaatacgcggtgcaggcgcttgacggcaagggtacgcactacgaaatcgcaggctggacctacaacatgtacggcatggtgcagctcgacgacgaagtggaaatctccgtcgaacgagtcggccgcgtggcacactccggcatggtgctcgaagtgaccagccgcatcgacggcaacatcgtgtctcgtggcaccgccatcgtacgtgcgccgaagtccgccttcgtctacccgggccagggcatacagcagcagggcatggtactcgacgagcgtgccaagtccccggccgcacgagacgtatgggagcgtgccgacaaggtgacccgcgagaagcttggattctcgatcctcgccgtcgtgcgtgacaatccgaaggaactgaccgccaacggcgtgacctaccgccatccggaaggcctgctcaacctgacccagttcacgcaggtggcgctcgccagcgtggcattcgcccagaccgcacgtctgcgcgaagccggcgccgacatttggccggcctatttcgcgggccactcgctgggcgaatacaacgccctgagctccttcgccggcgtgattccgctggaaaccgtgatcgaactcgtgttccaccgcggttccaccatgcaccacctcattccgcgcgacgagaagggccgttccaactaccgcatgggtgctctgcgcccgaaccagttcggtatcggcgatgacgacgtgcgcgaatacgtcgaatccgtgtcgaaggcttccggcgagttcctgcagatcgtcaactacaacctggctggccagcagtatgccgtggcaggcaccatcgccggtttgaaggcgctgaaggccgattccgaccgccgcgtagccgaatatggcggcaagccggcattcatgctggtgccgggcatcgatgtgccgttccattccacgctgctgcgcaagggtgtgccggaattccgcgacaagcttgacgcgctcctgccgcagaccatcgattaccgtggtcgcttggtcggacgctacattccgaacctggttgcggcgccgttcgaaatgacgaaggaattcgcggccaagattctcgaagtcgtgccgtccgagcgcattcaggccgctttggatgatccgcagatttgggattcctatgctgctgatgatcagaagcttggtcgtttgctgcttacggaactgctgtcttggcagttcgcttctccggtgcgttggattgagacgcaggctctgctgttcggttccgccgaacagggcggtcttggtgtggaagagtatgttgaggttggtctcggcaatgctccgacgctcgccaatctgggttccaagacgttgcgtctgccgcagttcgccggtcgcgatgtgacggtgtacaacgttggtcgcgatgagggccgcgtatatatgaccgattccgattcgttggttccggaagaagatgccgacgattctgcagttgcggctgcggcttcttctgcggctgctgctccggctggtgcctcagctcctgcggcggctcctgcagccgttgcggaagttccggttgccgcagcttccgctggcgctccgtctggtgccgccgttgcggatattccattcaaggcatccgatgcgatcgccacattgctggcttactcggccaaggttcgccccgatcagatcggcgaaagcgataccaccgatacgctgactaatggcgtgtcttcccgccgtaaccagttgcttatggacatcagctccgaactgggcgtggcttccgtggacggtgccgccgaagcgacggtcaaggcgctgagcgctttggtcaacaaggtcgctccgaactacaaggcgttcggtccggtgctgtctgacatcgtgcgcgaccgtgtgcgtggcatgttcggtgccgccggtgtgaagctcggccagatcaccaagcgtgtgaccgatacatggcagcttggtgaagggtggacttcccatgtggtggctgcgctcgtgctcgaaacccgtgagggggccagctctcgtggcggtgatcttgcctcgttgagcacggatgccgcttccaatgcggccgctgccaacgcgctgatcgatgcggccgtgcagaaggttgccgccgacaagggcatcgccgttgccatgccgagcgctggtggcgcagctggcggggctgtggttgattccgccgctttggacgcgttcgcggccaaggtgaccggtgccgatggcgtgctcgcctccacggcgaagttcgtgctgaaccagctgggcgttgccgctccggttgccgaagaaactgctgatgagaacgcggctgttgtggctgcggtcgaagccgaactcggtgctgactggccgaagcaggtcgaacctcgtttcgacgagcgcaaggccattctgttcgacgatcgttgggcatccgcacgtgaggatctggcacgcgcctactacaacaacgatgaatccgcattgaacggtagcttcatcggtctcggcaagaccattgccgacgaagcagcctggtatgcaggcaagagcgacaacgcggatctgaaggccgcgttcaatcgtgtcgctgccgaagcaggagaaaacgcttccgaatcggcggaaaccagccgtttcgctggagatatcgccgtggtgacgggtgttgccccgaattccatcgcagcgcaggtggtcaacggcctgcttgccggtggtgccaccgtggttgccacctcgcacagcttcaagccgagcgtgaaggcgtgggctaagcagacctaccgtgagcatgcggcgggcgatgccaagctgtggctggttcctgcgaacctgtcaagctaccgtgacgtggacgcgttggtcgcttgggttggcaatgtgcagaagaagacttccggtgcgaccaccacgattctcaagcctgcttacgagccgagcctgttcttcccgttcgcggctccgccggtgcatggcagcctcgctgattccggcgagctgttcgaatcccaggctcgcctcatgctgtggggtgttgagcgtgcgattgccggacttgcgaagatcggcgccgacaccgatgtgcagcataagttgcatgtggtgttgccgggctctccgaaccgcggtattttcggcggagatggtgcctacggcgaggtgaagagcgcatttgatgcgattgtgaaccgtgctcgtgctgaaaaggtgtggtcgagccgtgtgaccttcgcccatccgaagatcggttgggtgcgtggcaccggcctgatgggcggcaatgatccgctggtcgaagtggtggaacgtcacggtctgaagacttactccaccgccgaaatcgcggttgaactgctgaacctctccacccgcgaatcccgtatcgaagcggccaaggctccgctcgacgtggatctgaccggcggactcggcaacgagccgatcgatatcaaggcactgcgtgcggaagccatggaagacgcggctcaggcggaagcggcgaatgccaagaacgcaatcgcaggcaacgaatccgatactgcggtcaagacgctcatcaaggcgttgccaagcccgcgtgctccgcgtcaggccaaggtcgatcttgccgattggcagaacgtcagcgcacgtccggaagacgaaatcgtcatcgtgtccgtgggtgaacttggcccatggggctccggccgcacccgtttcgaagccgaactcggcatccattccgacggccaggtggatctgtctgccggcgcggtgctcgaactggcgtggaacatgggcctgctgacgtggaacgacagccccaagccgggctggtacgacgttgacggcaacctcgtgcctgaggaagacatcgcggaacgctaccatgacgaggttgtggcccgttccggcgtgcgtccgttcgacgaaggcatgggcaacgactacaaggacggcaccgacgaggaagaggccgaggtgttccttgaccacgatgtgaccttctcggttccgactcgtgagatcgccgaagagtacgtcaagcttgacgaagcccacaccagcttcgcggccgatgcggaatccggcgaatggaacgtcacccgccatgccggctccatgattcgcgtgcctcgccgcgcggccatgacccgcacggtcggcggacagttcccgaagggcttcgatccggtcaagtggggtattccggcctccatggtcggcgatgtcgacaagatcgccttgtggaacatcgttactacggttgacgcctacctgtccgcaggcttcacgccgaccgaaatcctcgaggcggtgcatccgtcgatggtggcctccacgcagggcaccggtttcggtggcatggcctctatgcgcaagctgtacttggatcgcttcctcaaccatgagattccgaccgacattctgcaggaggctctgccgaatgttgtcgcagctcacgtgatgcagtcctacattggcggctacggcaatatggttcagccggtttccgcctgcgccacggctgccgtctcccttgaagagggtgccgacaagatcgcgctcggcaaggccgacttcgtggtcaccggcgcaatcgacgacatcggtgtggaatccgtgatcggcttcggcaacatgaacgccaccgccaattcggaggaaatgtacgccaagggcatcgacgcacgcttcttctcccgtgctaacgatcgtcgtcgtggcggattcgtggaatcccagggcggcggcaccatcctgctgacccgtggcgatatcgcactgaagcttggtctgccggttgccggcgtggtcggattcgtgcactcctacgccgatggcgcgcacacttccattccggctccgggattgggtgcgctcgctgcaggcatgggcggcaaggattccaagctggtgcgcgatctggcccgtctcggtgtcgctccggatgacatcgccgtggtttccaagcacgacacgtccaccaacgccaacgatccgaacgagtccgaactgcacaacacgttggcccacgccattggccgcgccgacggcaacccgctgttcgtgatctcgcagaagacgcttaccggtcatgccaagggcggtgcctgcatcttccagatcaacggtctgacccagctgttcaagtccggcatgattccggcgaatgcggctctggactgcgttgatccgaagctcatgcgcgacgaccacatggtctggctgcgcgagccgctgaaggtcggctccgtcaaggctggtctggccacgtcgctcggtttcggccacgtatccggctttgcggcgatcgtcaatccgggcgcgttcgaagctgcggtggccaacaccgcgggcgtcgaggcgttgaacgcgtggcgtgatcgcgccaacgagcgtctggcggccggtcagcgtcgccttgaggaaggcatgatgggtcgcgccgcgctctacgagccgatcgacaaccgtcgtttccatgaggacggccgcggctacaacgcgcacgaggtggagaaggccatgctgctcgacccgaacgcgcgcctgggcgcatccggctacttcgaagcctgattccgtgaggtgagtgcttgaaaatccttaggcactgattgaggtactcaccgcaatcccgcatctgtcgcaatctcagcatttcgcggcaggcgcgggattttcatattcttgaatcaccttactgcccgtctgcacaactcccgttccatgtctgcacagtgcgggcgacagaggatgaagcgcttaagtatgatggtatccttgcatgaaagcgaagtgtcgcccgcctgtttcgcggaagtcgacatggttcgtttcttcctgaaaactttcgaaaggctggaaaatgctgggtttagggcatgacgtcgtggatgtgcctgcgttcgccgagcaactgggcgaaccggggtcgcgcatgcgaaacctgttctccatgcgcgagctatggcagaccgctcaacgtgtgcaggtcaaaagggacggtgaggcggtgcatcttgcggcccgatgggcgggcaaggaagcttttctcaaggcgtggtgcgaagcgatttcacgcagggcaaatgccgatggagacattgcctatccgtacacgctcgacgattttccttgggcgcgcatcgaaatacttgacgattcccacggcgtgccccgtgtcatgctctcgcccgaggtgcgacgcaagttacggcaatcgttgggattgccggttgatggggatgatcaatcgtgcgcaatccatatttccatgagtcatgacggatccgtcgcatccgcggtggtgacgatagaagcgtgaccgcaagtgattgcgtcaatcgattgacgtcaatcgcgacaacacctcgaaccggtttgataaaaccgtaaaatcacgctacactggtgccaacgtcgtggcaacgaacgctgcggaatccaactcataacaacgaagttccctgggaagaggagtcaaggaatggcacggtccaaatccgacaaagcatttgacgagcgcgtcgcacaatatagtgaggaactgcgcgaactattgacggatctgtatggggagcaggccgacgaagccttccgcaacctcaccgagctgatggccaaagcccacgatgcgcgccccgccgatctgaagcgtctcgacaccaagcgcctcgccgatccggaatggtacaagcgcggcaacatgttcggtatgaccatgtacaccgatctgttcgccggggatctgaagaaactcgccgacaaagtgccgtacctgaaggaacagaaactcacctatctgcacctgatgccactgctgaaaatgccgcatccgcagaatgacggcggttacgcagtggaggatttcgacaccgtcgacccgtcgctcggcaccaacgaagacctcgccgcgctcaccaagaaactgcgtgcggcaggcatcagcctgtgcctcgacttcgtgatgaaccacaccgcatccagccatcgctgggccaaagctgctcaagcgggcgatccgaaatatcaggactactactactgccacgacgaccgcaccatccccgaccagtatgacgccgtggtgccggaagtcttcccggccaccgcgcccggcaacttcacctggaacgagcagatgcacaagtgggtgctcacctcgttctacccgttccagtgggatttgaactaccgcaacccgaacgtgctcgtgtcggtgctctccagcgtgctcggcctcgccaatcttggcgtcgaagtgttccgcatcgacgccgtgccttacatctggaaggaactcggcaccaactgccgcaacctgccgcaagtgcacaccatcgtgcgtatgttgcgcatcgtgctcgaatgcgtctgcccggccgtagtgctgaagggcgaagtggtgatggcccccaaggagctcgccgcctacttcggcacgccggaaaagccggaatgccacatgctctacaacgtgtcgatcatggtgaatctgtggagtgcgctcgccagcggagacgtgcgtctgctcaaagaccagctcgacaagctcaacgcactgccggaaaactgctggttcgtcaactacctgcgctgccatgacgacatcggctggggcttggacgaaccggtggaggagagcctcggcatcgacccgctcaagcacaaggaattcctgtaccacttctacgagggatcggtgcctggcagctgggctatgggcgagctgtacaactacgacgaggcgtcgaaggacgcgcgcagctgcggcaccacggccagcctgtgcggtgtggaacgtgcgctgatcacgcatgacaagccgctgctcgacatttcgatgaaacgcgatctgatgatgcattccgccatgtcgttcctgcgtggcttccccatgctgagctgcggcgacgaaatcgtgcagctcaacggctgggaatacaaggaggatcccgatcgcgtcgaggattcgcgcaatctgcatcgcagccccttcaattgggagaatgcggccaagcgcaagcaggcgggcacgctgcagaagcagatgtgggacggtttgaagagcgttcgtgagatgcgcgacgatcccgctttcgctccggaagcatgggtcactacttgggatgcgcataatgatgcggttcttgcggtggtgcgccacattgaaggacgtacggtattgggattgttcaatttctcgtccgcacgtcagatcgtgcatcttgattcggacggcgatatcgagcttcctgccgaagttgcgttggagccgtatcaggtttgcgtggtcgaacaataaagattgcgatttcgacttgcgattgttgagggagtgtgtataatggctcgagtcgtttcgtgttggcttcggctggcatagacggtgcgcggatgtagctcaatggtagagcctcagtcttccaaactgattacgcgggttcgattcccgtcatccgctccacacaatcgttagagaagaagaaaggcgtgcttgacggcacgccttttgcatacctaccgtacgattgcttcgacgactgggtatgctggacatgtcgcgacagcggtgcgacaatcgcaatacaacggagcgggtatggcacaaacgcaaggcaacaaggtgacggaagtcgtcgacggcgtggtcgaacaggtcgatgtttccaagcatccaacggcatccattgaggcgtccgatctttccttggccgatatcgaacggcgcaaatcgcatccggggcattgggcgctgttcatcgcgctggtgctggtggctttgatcgcgccttactggtgggggcgtgtcatcgcagtcaaggatgcggcttggatggtggccaatctcagcttcctcgatcccaaaggcgtggcgctgatttcgtggacggtcaccattatggcgatggccggtttgggattgatggttgcggatgtgaagaaatggctgtggggcacggttttcgtggtgggactcgccgccgaacagttcgtcgccggcgtatgcctgctgagcttcaacttttggaacgccacctacgtgatgtacggcgattcctcagggctggccaacgcggcgaaccttggcattatcgcagccggatgcggtgtcgccgtctatgcggtgctctgggtcggattgctggtatgcatcaaaaaggaatcgaaattcaatgtgctgactcgcagttgggcatcgttcctgctgttcttcgtgattgagatcatcgcgctcgccgtggtgttgttcggaggtctgctgaacgtggtctgatccgccatttgttgtggattcgatttggtctgcccttcgtgtatgatttccccttggcgtgtttcgcccgcggatagagagcgcgccggtattggaccggcagcaccgcgcagcaatataaggaggatgccgtggcacttacggctgaggaaaagcaggaaatcatcaagacttacgctacccacgagggtgacaccggctccccggaggtccaggttgctctgctgaccaagcgtatcgctgatctgaccgagcacctcaaggagcacaagcatgatcaccactcccgtcgtggtctgctgctgatggtcggcgatcgtcgtcgtatgcttgattacctcaagcgcgtcgacatcaaccgttaccgctccctgattgagcgtctgggtctgcgccgatagttaaattcttccgcccgaatgccttccttggcgttcgggcgtttttgcatgacagccgcgttgaggaaaagacagtttgaaagcccaaggtttagggtgcatgaggtctagaatctaaagatgaggaagcgacgaaggtaacgtcgcgtcacgcatgcagaaatcggttggagtccgctgaagaggactgccgatagttggtaaaagaaaagaaaaaggaggaaccctatggagggtcccgaaatcaaggctgttgaagccgtaatcgataatggttcatttggcaagcgcacgttgcgcttcgagaccggtcgtctcgcccagcaggcggatggtgccgtcgccgcctatcttgacgatgattcgatgattctgtcgaccaccaccgccggttccagcccgaaggagaactacgacttcttcccgctgaccgtggacgtggaagagaagatgtacgccgccggcaagattccaggctcgttcttccgccgtgaaggccgtccgagctccgaagcgattctcgcttgccgtatcatcgaccgtccgctgcgcccgttgttcccgcacacgctgcgcaacgaagtgcaggttgtggaaaccgtgctcgccgtcaacccggacgatgcgtacgatgttatcgctctgaacgctgcttccgcttccaccatgatttccggtctgccgttcgaaggcccggtttccggcgttcgcctggctctgatcgacggccagtgggtcgctttcccgcgttggagcgagcgtgagcgcgccgtgttcgaaatcgtggttgcaggccgcgtggtggagaacggcgatgtcgccatcgctatgatcgaagccggtgccggcaagaacgcctggcacctcatctacgacgaaggccagaccaagccggacgaggaagtcgttgccggtggtcttgaagcagccaagccgttcatcaaggtgatctgcgaggctcaggccgaactcaagaacatcgctgcgaaggaaaccaaggaattccagctcttcccggagtacaccgaagatctgtacaaccgcatcgacgagatcgcccacgccgatctcgacgaagccctctccatcgccgagaagctgccgcgccaggatcgcatccatgagatcaaggagggcgtcaaggccacgctcgccggtgaattcaccgacatggacgatgccgagaaggaaaaggaaatcggcaacgcgttcaaggagctgcagcgccagatcgtgcgtcgccgcatcctgacccaggattaccgcatcgatggccgtggcctgcgtgacatccgcaccctgtccgctgaagtggacatcgttccgcgcgtgcacggttccgcactgttccagcgtggcgaaacccagattctgggcgtcaccaccctgaacatgctcaagatggaacagcagatcgacgcactgtccggtccgcagtccaagcgttacatgcacaactatgagatgccgccgtactccaccggtgaaaccggccgcgtcggctccccgaagcgccgcgaaatcggccacggtgcgctggcggagaaggctctcgtgccggtgctgccgaaccgcgaagagttcccttacgccatccgtcaggtctccgaagccattggttccaacggttccacctccatgggttccgtgtgcgcgtccacgctgtcgctgctcgccgcaggcgtgccgctgaaggccccggttgcgggcatcgccatgggcctcgtgtccggcgatgttgacggccagcacatcttcaagaccctgaccgatattctcggcgccgaagacgccttcggcgatatggacttcaaggttgccggtacttccgagttcatcaccgctctgcagctcgacaccaagctcgacggcattccggctgacattctggcctctgctctgcagcaggccaaggaagcccgtaccaccattctcgaagtcatcaacgagtgcatcgatggtccggccgagatgagcccgtacgcaccgcgcatcatcaccaccaccgttccggtcgacaagatcggcgaagtcatcggtccgaagggcaagatgatcaaccagattcaggaagagaccggtgcggagatcgccatcgaagatgacggtaccgtgttcatctcctccgaaggtggcgacggcgctgaaaaggccaagcagatcatcgaccagatcgccaacccgcacgttcctgaagccggcgaaacctacagcggcaaggttgtgaagaccacctccttcggtgccttcgtgaacctgaccccgggcaccgacggcctgttgcacatctcccagatccgtaatctggccaacggcgagcgtatcgacgccgtcgaagacgtgctcaaggaaggcgacaccgttgaggtagtcgtgcagggcgttgacgatcgcggcaagatctccctggccattccaggcttcgaagatcaggaatcctccgctccgcgccgtgagcgttccgatcgcgatgaccgtcgcggcagccgtggccgtcgtgatgaccgtcgttccgatcgtgacgatcgcgattatgatgatcgtccgcgtcgtcgtcgttccgatcgtgacgatgaccgcgattacgatcgcgatgaccgtccgcgtcgtcgtcgttccgatcgcgatgaccgtgactacgatcgtgatgatcgtcgttccgatcgtgacgatcgtgattatgatgatcgtccgcgtcgtcgtcgttccgatcgtgacgatcgtgactacgatcgtgatgatcgtcgttccgaccgtcgccgcagcagccgccgtgacgaccgcaacccgcgttacgcagccgacgagaactacgacgagtaccgtgccgatcgcgaagagcgttccgagcgtcctcgccgccgcgtccgccgcgactttgatccttttgaggactgacgcctcaaaaggacccttcgcagcatgactgactgactgaagtgccctgtaccggaaggtacggggcacttttgcgtttccatgcagattgcatgaaaatgagacacgggggcatgagttttgtcataacgtacctgggcgcatgcaagaatggtgtgaagagccattaacgaaggagtcgtcatggtcgttggcattatcattgccgtcatcgttgtacttattgtgctttgggccgtcagcgcatataacggattggtcacgctacgcaatcgtgtgaagaacggttgggcgcagatcgacgtgcagctcaagcagcgtaccgatcttattccgaacctggtggaaacggtcaaaggttatgcggcccacgaatcacaagtgttcacgcaggtcacgcaggcccgtgccggcgtggtgcaggccgcgcaaagcggtgacgtggcgcagcgcatcgccgcggaaaaccagctgagccgtgcacttgtcaatctgcaggcagtatccgaaaactatccgcagctgcaggccaatacgaatttcatggatttgcagaatcagctgaaatcgttggaagagaagatcgcctacgcacgccagttctacaacgatgtcgtgcagaagtacaatacccagaccgaggttgtgccgaccaatattatcgccggcttgttccatttcgaacaggccccctacttccatgtggatgaagcggatcgtcaggttccgcaagttaagttctgacatgcatgtaaagccccgtccgatgacgatggggctttactgttcaattcggcttgtacggccatctgttgtacggccatctgagggaagaagaagcgagaaagagggattatgacggccaaacagcatgcgtcgcgagcggtgcgcagctttggtatcgcgatcgtcgtcaccattggcgttgtagcggccatattgctgaccatcgcattggatgacggtggggccgatctgagctacaaaacgctcgactacgatgtgcaggtgcaaagcaatggcgatttgaaaatcacccaacatatcgatatgaaactcgccgaccgcagcgatgacgacggcgaccatccgtggaagcagctgtaccagcagtacacgttgaaggaaagcaacctggccaatatcaccgatatcagcgtgcgcaacgcgacgacgggagagacctaccagcagggtgatatcgcaatcccaagcagctatagcaccgacgaatggaatcgagaacatgcggggcagtggtatatcgccgatgtttcgcaaggtggcagcaatccgcagccgttcgatcccgcaaaagacggtcttgtttccgacaataccgacgatcgttccaagaaaatcgaaatcggctggaatattcccgccaccacgtcggcgagcagcctgaaattcgatgtgaccatgaccatgcagggcgtgaccaccgcctatcaagacgtggccacgttccaatgggagccgctcggcgtgagcaatcagattcccatcggcaaagtcaccggaaccgtcacgttcccggatggcattacggcggataattcatgggcttggctgcacaccgaacgtacgtccaccaccgaacgcggtgataaggggtcgttgcagttcaccgtgcacgacgttcgtgccggcgactatgttgacgtggtcgccatgttcgacgtcggtgcgaccagcggtgtggcacgcactcgtgataccaccatcaaaaacggcattatgaaaagcgaggcccaacaggagcagcagtggcgtgaccagcagcgcacaaaagcgcgtatccgcctgatcacgtggatcgccattgccgtggccgggctgatcttgtgtgtgatcgccgttgtgctcgcattgcgcagtttcgatcgttcgcaataccacggtgacatcgagtattggcgtgacgagccggaaatgagccccgccagcgctgcggaactgctgtatatcgttgacaacaagcattcgaaaacactgtcgagccgaaaaatgtcggcttccgtgctctcgctcgcttcgcgtggagcaatcgccatttacccggggccggccgccatgtatcggggcattgatatgagtcggtctcgcaatgccgatatcgcgcagctgatttccaatgatccagcccgtgcgcgtgatgcaggcaaaaccagcaccatcgtgatactgccggtggtgttcgataacccgcagtcattggcgctgagccagagcgaacgtaccgcgctcgacctgctggtgaaggcgtccgaacgtattggttctccggtgttcgacctgaaacagatggacaagaatttctccgattggtcgaagggctacaagtatcaggaaaagtttacgaatgcgtgcagtagcgaattctccatgttgggtgccacttcggcatgcggcgggggagcgttcgccgcaggcatctgcgccgcgatcctggcgttcctttccatagtgtattttggcgtgatcggcaatcttgcgttggtcgtgctgatttccgcgccgatgatgttcgcgtccgtgtttgcgctgagctacctcaaattgaaggggcttaacgacaatggtcagcgtcttgccggtcaggtggtcggtttgaaacggtatatggaggatttcagcgacttccgtgatcgtggtgtggctgatctgacgttgtggggtcgctacatggtgtacgccaccgcgttcggcatttccgaaaaggcgatgaagcagctgctcaaggcgtacccgcagcttgccgacccgaattggcttgatgccaacgcttccgattcgctgctctactggagttaccgttcatggtatttcaatcatcattacgccggtcctgccccgtttgatacgaattcgatggatttctcgccgagcgccaattttggtgatattggcgcgcagttggaatcaggttttgctgatattcaatcgacgattgccgcggcatctccgtccagcagttacagtggttccggtggtagcttctccggcggtggtttcggcggttcctccggtggttccggtggcggcagcttcggcggtcgctgacctgcggcattacgcgcatgtttggtgggtttgctgtctgctgaggcgggtcggctggtaaggttgcattcggaaagacactctgtacgttgttgaaggagatcgggatggctttgttccgtaatcttggaccgttccacaccacggccatcggccatggcgaaatgccgttgaccattgaaaacaatcgtggtcacgatgtcggtatcgaaacattgcacgcctcgttggatgccggatgccgtcacatcgacaccgcttgggcgtactacacgccgggcgaagaggaacagaccggcgaaaagctggtgcgtgaggcgcttgactcgtggaagggtccgcgtgaggaagtcaccgtggccaccaaggtgggcttgcgccgcgcttgggagggtgacaagccggtttggccgcgtgacggcaagccggagcatctgatcgaatacggcaagcagtccgcgatggcgcttggcgttgacagcatcgatctgctttacctgcaccgtcatgatccggaagtgccgtacaacgagtcctgcgaaggcatcaaggcgctgctcgatcagggcgtggcccagtgggcgggtgtttccaacgtgagcatcgaacagttgaagatcgcgcaggagatcctcggcgacaagcttgtggccgtgcagaaccagtattcgccgattcatctggacacccaagacacgcttgactattgcgccgagcagggtctggcgttcgtgtgctggagtccgttgggcggctaccgtcacccgtacgacgagcacctgttcgatccgttccgcgaggtggctgaagcccgtggcgtcagctaccagcgtgtggtgctcgcatgggagctggccaagggcgaccacatgttcgtgattcccggcgcccaccgaccggaaaccattctcgattccctcaaggccgacgagctcgaactcaccgaagaggaactcgccaaactcggctgagtgtcagattcgcaacgatttgcgtcaaggcgtccgtcttatcgatggacgcctttgtttttccgcatgtgtttttctgtgtatgtatttcccggatgcggcagaagtgtcccgtgaatagttgagaatatagagcggaaaaatcgagtaagaggaacaagcgtgcaaagaagaaataagcctgaagtattggctcccgcaggcaatctgcgaggactgaaaaccgccgtcgattacggtgcggacgccgtctactgcggaggcaaggcgttcggcatgcgttcggcgccgaaaaacctgagcttggaggatttcgaggaaggctcccggtacgcgcatgagcgtggcgctcgcgtgtatgtgacctgcaatgtgttgccgcgcaacaatgaagtcgaagcgatgcgcgaatacatcggccagctcaaagataccggcgtggacgcactgatcgtttccgacattggcgtgatgcttatggcccgtgaagtggctccgaaccttgaactgcatgtgagcacgcaggccggagtcaccaactatcaggccgcgaacgccttctaccagttgggcgcacgccgtgtggtgcttgcccgtgaaatggatctgcaggccgtgcgagacattcgcgcacgcattcccgacgatcttgacatcgaatgcttcgtgcatggcgcgatgtgcatggcattctccggtcgttgcctgttctctaactatctgaccggacgcgacggcaatcatggcgaatgcgctcaaccgtgccgctggaagtattccatcgtcgaagaaaagcgccccggccagtattttccgatagaacagactaaggaaggcgcgtatctgttcaattcgcaggatatgaacatgcttgcgcatatcgacgatttgcttgattcgggtgcgaccagtctgaagatcgaaggacgttccaagagcgcctactatattgcggcgatgacgaatgcctataagaccgctgtcgacgcttatatggtgcaacgcggttttgaagacgagaatggcactgtgctgaagccgttccacgatcgtgtgattcgcccgtccgatccggaatacggcaagccggaaaccgccgattcgattatggaacatgcggatggcgcattcgcaggaaagccggatattgcagccgttcccgtcgcttccgcaggtgaaccggatgatctgagctaccatgcccgcagcgcaaggcgtaagtcgaacacggctgccgaaatcctgccggaaggctggtatcacgccggagtgcgtcccgcggaacacgtgtccctgcccgactggctgctggaagagccagacaaggtggcgcaccgcgactattccaccggcttctactatccggaacacaaagtgcagcaaagcaccgatcgttccgcgtatttccgcgcatggctggtggtcggcgaagtgctttcgtggagtccggaagacggcggtcgcgtgaccattatgagccgcaacaagatcgaagccggtcaagaggttgaattcgtgcttccgggtgcggctccgctcgcctataccgttccggctggcggattccgcgacgccgacggacattgggtcgaagccatcaacaatcctgcgcatgtgttctccatgccatgcccgcaggaagtgccggtgaacgcggccatccgatcgcgcaccaaaaagccgacgctcaaagcggaatgattgcgaaaaacatcgtgtagacgcagaaattagttgaaataatcgtagaaaaatcaaggaaaacaaaaaaatgactgacaagcagtatgatgacgcgattcttgacagcaatgcgatcgacccgaccgacgtggatggcaatccaattccggtgaccattccgatcatgcttgcgccgggcgtcaaagtcgtgtacaccacgcgacttggcggcaccagcgaaggagactatgcgcactgcaatctcgggggtaaaaccggcgatgatccgaaccatgtgctcgccaatcgtgtggcgctcgccaacgctatcgatgcgaaactgagcctggtcagccaggtgcattccggcgttgccgtcgatgtggacgaattgttcgtaatgaaccgtccgttcggtttcgacgtgtccggcagcaagggcgaaacagctcggcaggtgggcgaaaccgcggatgagccggcagtggtcgaggccgacggccaagtgaccgcgcagaagaacgtggcgctcggcatgttcgcggccgactgcctgccggtgctcatggccgatgcggaagccggtgtgatcggcgccgcgcattgcggtcgccgtggactgcagaacggtgtgatcggcgccaccgtcgaaaagatggtggccaagggagccaggccggagcgtattgtcgccacgctgggcccgtgcatctgcggcgactgctacgaggttggcggagacattgccgacgaattcgacgcgcagttccccggaaccttcacgctgagccgtttcggccagccgggcatcgatattgcggccgccgcgctgcaggagcttgccaaagccggtgttccggctgataacgtcgtttcctcccgcgcccgcgtcaacgcagccacccagtatctttccgaagacgaggaattggcggaaatctgccaggccgatggcgaaggcgaaccgcagctcgcggaacgtttcaagaaaatccgccgtagcctgtgcacgctggaaaatccgctctggttctcgcatcgccgtgccaccatcgcaggcaaagcgcacgaaggtcgtatgcttgcgctgatcgtgcgcgaatagtgggagagcggcgcgctattgcggattgcgtgcagaacgtaaggcaaaacgcgctgcaagccgattcgggggtttacggtgggacgtatgagtgagagagagcagatgcaggaacagaagatgccggttgtggccgtggtgttggcggccggtttcggcacgcgattcgatgagaacaatcccaagcagttggtttcggtgggggataagccaatcgtctgctggagcatcgaggcgttcgaacgtaacgatcgcgtgagcgacatcatcgtcgtggtcaacgagcgtgtcagcaatatggtgaacatgctcatcgacgaagccggttataccaaggtgcgtgccgtgattccgggtggctccgagcgtgtggacagcacccgctccgcgcttgatctgctcaagcaggcaggcattcccgatggcgcgaaaatcctcatccacgattccgtgcgaccgttcgtcgaacagcaatccatcgacggctgcatcgacagcctcgaccagttcaacgcggcgaccgtggcatacgcgtccactgacacgattctactgaccgaagatcttggagagcgcaaggtggtgcgctccgtgcctgatcgtacgaacgcattccgcgcgcaaaccccgcaggccttccgtttcggtaccatcaccaaagcctacgagctcgccaccgccgatcccgacttccacccaaccgacgacacccgcgtggtggtggactatctgccgaacgagccggtcgccatcgtcgccggatccgaaacgaatctcaaaatcaccacacaggccgacatgccgatcgccgagaacatcgcgcgcagcctcgacccggaacatgccaaacaagaagcgaaagcgcgcatgcacgcggtgttcgccgaagcattctcgcaaatgcataagcactgatcgtaaacgaacccacctttcgaccacgtacactggaacacatgcagcagatcaacatcgtcatctcaggtttcaccccgtacgacggcatcgacgtgaatccggccgtacttgttcccgtggcgctcgccgaatattggaatgatccatctcaatccgtggcgctgtccgacgatcttctgcaggatgtttccatgagcgtgacgacggtgacgcttccggtcagtttcgccaatgcctggcccatgttgctgaacgccatcgaacaggcgaatcccgatattgtcatcgccaccggtttgaagcgttcggcccgcggcgtgctgttggagcgatgcgccacgaatctgatggacgcggccaagcctgacgccgacaatgtgattccgcctcgccgtccgatcaatccggaagggcctgcggcatattggacgcgcctgccgttgcgttcgattctgcgcgatttcgccaaacatgagattcccgccgcgttgagttcggatgcgggcacgttcgtctgcaattcgctgttctaccatttgctcgactggtctgcagcgcaggaaaagcgcattctgtcgggtttcgtaagcctgccgatcgtcaacgagcagccacatccgcaacatggactgtcaatcgcgcagcaaatcgccgcaggtaacgatgtgatccgcgaatcggtgcgttattatctgcagccatcctcaagtgagattctgctcggctgaacggcgtcggcgtttcctcgaacgatttctgtgctctctgtgagaattatgcgactgccgtgtgccgaacgtttgttctgcgctaaagttcaaaacggataggcgcgggcaagatgcgcgatggaagggaattcgtgaaaggaataccatggttgagcagttcccaatcgtgttgagggggtacgacaaggaaagggtcgatgaggcgttcgctttggctcaggagacggtggaccgtctgcgtgatcaggtcaaggccgacgatcagaccatccttgaactgcaggcacagctgcaggaagagaaaaacaagaaggccaacccgaattcgttcgcatctctgggcgccaacgcgcagcagatgctcgccagcgcggaacaaaccagcgccgagctgctcgaccgtgccaagaaagacgcttccgcggcacgcgccacggtgcagcttcaggccgaaaccctgctgaacaacgccaagctcgacgccaagcgtattctcgacgaggccaacgccaaggccgaagcggtgctgtcgaaggccaataatgatgccgacacgttgaagtccaacgcccagcgcgaagcggaccagctgcgtggcgaagcgcagaaggccgtggtggcgcagcgccagaccgtcgatctggaattgacgaactcccgtgaggagcatgacaagcgtctcgcatcggagcgcgccacgcaggagcgcgagctctccgatctgcgcgccgaagccaccgagcagatcgcggcgcagcgcaagaacgccaatgacgagatcaaccgcatgaaaagcgagaccaacgaccagatcgaatccgcgttggccgaagccaacaagaagctggccgacgtgcgtgagcaggtgtccaagatgatgacggacgcgcagcgccgtgcctcggaaatcacggataccgccaaagccaaggcacaggagatcaccgacgaggccgaagtgcatcgcaccaagaccatcagccaggtcaatgccgaggtggagcagatccgcgccgacatttccgcccagcaggatgaggctacgaagaaggtcaacgagctgctcgccgacctgaacgaacgccgtgaaatcgccaagaagcagtccgacgagctgatttcagaagcgcagcatacgcgcgatgaggccgaggcatacgcttccgacaagcgtgaggcagccgacaagcaggctgccagcattctcaagcaggccaccgaagaggccgacgagcagatcaacgagcgtcgtgaggcagccaagagcgagcttgaaggtgtgcagcagcgcatcgccgacctgcagacccgtgaggcgcagatcacgcagcgtgtcagtgaactgcgtgccatgttcgccaacgcgttctccgatttcggcgcgaacggcctgtccgtggtcaattccatcgacggcgaacagcatgattccgcagctgaagctgaaactccggcggaatcgcacgacgagagtggcgaaactgttgcgggcgaaccggaagtgaccttcgacgaggatgttgtctccgacgaacagcagaataatgacgattttgaagaaccgtccgaagacgagcagtctgaccagggcgaagaagcacaggaggaacagaacaatgactgacatcacgccgttgagcgctgatgcattggcaacgctggttgaggatttcgaagccagcgaccacaaccgtatggccatgaacgcggtcaccgcggcgggcatcaacaaggtggcacgcaactatgaccgcgcccgcctgatgcagcgcagattctccaccattgtcgacaatggcaccgccacccatcaggatcgttccggccgttgctggctgttcagctcgctgaacgtggcccgtttcgtggccaagaagaacatgggtctgaaggaattcgagttctcccagaactatgccatgtactacgacaagctcgagcgcgtcaactacttcctgcaggacgtggccgaactggtgaaggccggcgagccgtccgactcccgcctgatccagcatctgctcgccgacgtgatgggcgacggcggtcagtggaccatggccatgaacgtgtataagaagtacggtgccgttccgaaggatctgttcccggaaaccgaatcctccaagaacaccggcgaaatgaacgtgcaattgcgtcgtctgctgcatacggccgtcgcgcacatgtatgccgatccggcttcgatcgaatcggtaatcgccgaagcgaccgccgccggacaccgcattctgacgatccacttgggcgagccgccgaagagcttcgactgggagtggaccgacaaggacggcgagttccaccgcgatggtgagatcacgcctgtggaattctggcagaagtacgtcggttccgccgatttggaaagctacgtgtgcctggtcgacgatcctcgtcaggagcatgcgaagggcaagaagatcggtatcgagcacttgggtaatgtggccgggggagacccgaccgaatacctgaacgtgccgaaccagttcatgaaggattgcgtgcgtcagattctcgaagagcagggcattccagtatggttcggtgccgactgccacccgatgatggatcgtgaaaacggcgcttgggctactgatctgtttgaatacggcaaggtgtatggcgtcgacttcgatctgaacaaggaagatcgcgtgcgtttcgccgattccgcgatgaaccacgctatggcgttcgtcggcgtggacgtggccgaagacggcacgaccacccgtcgttggcgtgtggagaactcttggggcgacaagatcgcagacaagggctacttcactatgagcgacgactggttcaccgaatacgtgtacgaggtcgccgtgccgaaggcgctgctccctgccgaatatcaggccgctcttgacgagccagccaccatgctccccgcatgggatccgatgggcgctctggctgactgatacgtaaaccgacaaaccgattgacgaatgccgactgcatgggacttcgcaaaaagtccagcatgcagtcggcattcgtgttattccacttttatccgttaaggtaacttcggtgattatcatccatgcacagtatgcatgaagcaggtatgcaggtataaggaggagcagaagagatgtcaggtcttcgcggtccagatagttcgaaggatgcgcagttgttggataacgccgtgtttccggagaccgtggatgtcaatattcgacagttggacccgattccggctccccgatattttctgaaggaaattccactcaccgatgagatgagcgatctggtgttgaagtcccgtcaggaaatccgcgatgtgctcaacggcaaagacgatcgtctgcttgccatcgtcggcccatgctcgattcatgatccgaaagcggcgcacgaatacgcggcaaaactcgccgcggtcaaaaaagaactggaagaccaactggtcattgtgatgcgcgtgtatttcgaaaagccacgcaccaccatcggttggaagggtctgatcaacgatcccgatctcgacggccagttcaacattcgcaagggcatgtggctcgcacgcaaggtgctggccgatgtgctgagccttggactcccggcagccacggaatggcttgacccgatcaccccgcagtacatctgcgacctgattagctggggtgcgattggcgctcgcaacaccgaaagccaggtgcatcgcgaactcgcgtcgggcatgtcgatgccaatcggcttcaagaacgccaccgacggttcgatcaagccggcagcggattcctgcttcgcggccgccttcgagcatcatttcctgtccatcaatcttgacggacgtgtgatttccgccgaaaccaagggcaatcccgattgccatctggtgttgcgcggctcctcgcacggcccgaactacgataccgaatccgtggcgaaggcgttggccgatctgaaggtttccaaggcgtccggcccgagcgaacacggtcttgtcatcgacgcggcgcacggcaactgcggcaaggacgaagtgcgcgaagccgaagtgatcgaaaacatcgcctcccgcatcgcaacgggagagtcgggcatcagcggcatcatgatggaaagcttcctgaaagccggcaatcagaagcccgctccgctcgaccagctcgagtacggcaaatccatcaccgacgcctgcgtgccgtgggaacgtaccgaacagttgctgcacacgcttgccgatgcggtcgaaatccgtcgcgcactcgccaaataatcgcaaataatcgcaaataactaaccgtgcggaatacgcgtaactgcgtaatcgcacggtttttgcatagcgactgccatttgattgatattcttggggagataggtgattgtcaaggagagcagtgaaatgcagcagcagctgaacacgcctgaagagcttcgcgccatccgcgaggccatggatgagggaaagaatccgctggtggctacggatgtgccacgctgggaagaccaggtcggcatcagccgcatcgtgaaccgcagggtgcttgaattcgaggtgcttcccacgccggcgcaggtgttgggggacctgccgctcagcgatcaggcgcaagagatcgtcgcctattcacgcgatgagattcgtgcctgcctgtacggccaggacgatcgattgctggtgatcgtcggtccgtgttccgtgcatgatccggctgccgcactcgattacgcccgtcgcttggccgcgttgaaagacgagctgggcggagaattgctgattgtgatgcgcgtgtatttcgaaaaaccgcgtacgacggtcggttggaaaggcctgatcaacgatcccgacatcgacggcagctgcaatatcaaaaaaggcctgcttttggcccgtcgtacactgcttggcgtattggacgcaggtttggccgccgccacggaattcctggaaccaaccagcccgcaatacatttccgacgcggtcagctggggtgcgatcggcgctcgcaatacggaaagccaagtgcaccgccagctcgcttcgggcatgtcgatgccgatcggcttcaaaaacgctaccgacggttccatcaaagcgccgaccgactcgtgttttgcgtcggcacagcagcatacgttcttcggcatcgaccatatgggtcgtgcggccgtagtcaaaacgctcggcaatcccgactgccatgtggtattgcgtggttcgagcagcggcccgaactatgacgccgaatccgtggcgaatgccatgaagctcatccgtgaggaaatgccggtcgaatccgcggcggcacacggtctgatcgtggactgctcgcacggcaattccggcaaagacgaacatcgccaagccgaagtggtacgtaatatcgcaagccgtatcgccgaaggtgaggaaggcatcagcggcatcatgatggaaagcttcatcgaaggtggcagtcaaaaaccggcaccgctcgccgaactcacgtacggtcaatcaatcaccgacaaatgcctgagctggcagactacggaagcgttgctgcgcgaacttgcgcaagctgtgggcaagcgccgctggaagtgagcgaagcgaaaataagcgaaaccgagcgaaaagcgtgaagcaatcgaaaggaacgaacgcatgagcacaatcgccatcatcggcgccatggacgaggaagtcgccaatatcgcatcagcattgagcgacatcaccgtaacggaggaagccggcgtcagcgtgacacgcggcaccatcgaaaccaacaagggcactcgcgtcaacgttgcggcaacggtcggcggcatgggcaccgtcaatatcgccgccaccacgcagcatctcatcgacgcggaccagcctgacgccgtgatcttctccggcatcgcaggcaatctcaacacgcatctgcacatcaacgacgtggtgcttggtggtacgttgcgttacctcgacactgacatgcgtctcgtaggtcagtggaagccaggcactgcagaccagccggtggaggaattccactccgacgaccgtctgatcgaagtcgccgataaggtgctgaccgatctgaacgtgcatcacatcaccggcatcatcgccacgggcaactatttcgtggacgatccgaagaaagtggagcaggtgattcgcgaaaccggcgcggacgcggtcgaaatggaaggcgccgcggtggcgcatgtcgcggcgcgcaacggcctgcccgtgctggtcatccgcgcgttgagcgacaatgccgacacggattacgtggaattcaaggaattcgacatttccgaatatgccgacaccgcggcgaaaatcgcggtgaacatcgtcaagcgcatgtaagcgcatgaaagacggcccgtccaacgcatcggttgctggacgggccgtctcatatttcggtatggcgaatctcacgaaagtgaactgcggggaaacttccgatggcgtgagggaatcgcgcacggaaatcgctttccggaaccgctactgttgaagaagaatgacggattatcggaaggttaacgtatgacgctggagcacgtggtgatggcgattgtggttgttgccgtcgctgtggtcgcctttttgctggggcgtgcccgtggcgtgcaattgggggaggatgagatcgacccgaacgatccaagcctgttcggcgcgcagaagaacatgtcgctgttcgggccgcgcgtgcccgtgcagtccacggaacgccagctgatcgccgtcatgccggaggcgttgatcgtcgtcgattcactggcgtcggtcacatatgtttccccgggcgcgcaacgtttcggcattgttgaggacagtgcgatgacgcttgccgaaatccgcgatattctgcgattggtgtcgaccgacagcgtggtgcgcgaacgcgaattgtcgattccgctggatcgagccgcccgtgcggccgcgaaaaacaccgacggcaaaggcattgaggcaggtaagttccgtccttccgacacgctgtatctgcatgtgcgggtcggccagatctccgatgatctttttgcgattttcatttcggatatgagcgagcagcgtcgttttgagattatgcgacgcgattttgtgacgaacgtttcgcacgaattgaagactcctgccggtgcgatttccctgcttgccgaaacgatcggcgacgctgcggacgatcccggcatggtgaagtattttgcgggccgcatttccaaggaatccgaacgattgacggaattggtgcatcgcttgatcgacttgcagaaggcgcaaagcacggctgcggtgctgaacgcggaacggctttccgtgcttgcgttggtacgcgaggcgatcgtcgaaaaccaggtgaaggccgaatcgaagcatatcaatctggtgctttcgctgaatggcaagcagaagctggtgcacgtcgagggtgccgtaaacgctgtcgatgaggatgatctgttcatcaacgccgatcatgaaaccatcaaaacggcggtgaagaatctggtggaaaacgccgtcaactattctccggaacacaccaccgtcgcagtcggcatcggcagtggcgatgacgaggttgcgattcgtgtcgtcgatcagggcattggcattccggaatcctcgctggatcgtattttcgagcgattctaccgtgtcgatcccgcacgttcccgcgaaacagggggtacaggattgggtttggccatcaccaaacattgcgtgcaggattgcggaggcactatcgccgtgtggtcgcgtgagggggagggatcgaccttcaccatcaccctgcctcaggcacaagcggtggaaacagcggaaactgcagggactgcgggaaacgtacaaactgcggaagcggatcgcatggaagtgacgggcgaaaccgaacgcatcgaaactacgcaatccgagtaatccgaataatctgagctaaaccgaatacagcaaataacaagcaacgttcccatcaacagagcaatggaggagaagcactgatgacacgtattctgatcgtcgaggacgaggaatcgtatcgagagccgctggtctaccagctcacccgcgaaggctacgacgtgtccgccgcggccaccggcgaggaagggctggaactgttcaccaaaggcggcatcgatttggtgttgctcgatctgatgctgccagggcttgacggcaccgcgctatgtcgcagaattcgtgagcaaagccgtgtaccgatcatcatgctcaccgcgaaaagcgcggaaatcgacaaggtggtcggtttggaaatcggcgcggacgactacatcaccaagccgtactcgttccgcgagctgctggcgcgggtgcgtgcggtgctgcgacgcaaccagatggtggccgacgcgacggaatcctccgatgacgatattccgctgatctgcggcgacatttccatgaagatcggccagcatgaggtgatggtgcgcggagagaacgtgttcttcccgctgaaggaattcgagcttctcgaatatctcatgcagaacaagggccgtgtgatgacccgccaccagctgatcgaccgcatttgggggtccgattacgttggcgacaccaaaacgttggatgtgcacgtcaagcgcgtccgctccaaaatcgaggaggatccggcgcatccgaaatatctgaccacggtgcgcggtttgggctacaaaatcgacgttccagcggaataaagcggaaatatcgcgatagctggaaatatataagataaaacactgcgattccagtactcatcgtaagttgccgaataattgattattaattgataactgaatgtaagaccgtggtatcacggtagtcgccgaagatcggtgaatggaaatgacgaaaacgtccgaagtgtcgtagagtgttcatcttccgttcaccgattttggttttgcgggacccaaaccaccaataggcttgacagtgtcatgaagaacgatggcgacaacagcatatgaaatgtcagaaacatacgccatcagaatgttgacagagggaaaagaataatgcgtaattccattctcgtacgctccattgcagctgtgtccggcattgtgatgctggcttctgtcgcggcttgcggcgacaacactgcttccaacactgattcttcggctagcaccgacaccaagaccaccgaagccgtgtccggcaacttctccggcgctggcgcttcctcccagcagactgctgtggaagcctggatcgccggcttccagggcaccaacccggatgccaaggtcgcctacaacccgtctggttccggcgctggcgtttccacctttctgaccggcgccaccgcatgggccggctccgatgccgccctgtccaatgacgaggtcgagcagtccaagagcgtgtgcgcttccggcaacgccttcgacatcccggtctacgtctccccgatcgccgtggtcttcaacctcaacggcatctccggcaagggcaagaccctgaacatggacgccgacaccatcgccaagatcttcgacggcaagatcaccaagtggaacgatgacgccatcaagcagcagaacccgaaggtcgacctgcctgatctcgacatcaccgtggtgcaccgctccgacaagtccggtaccaccaagaacttcctgagctacgtcaaggatgctgctggcgacgcttggagctacgagctcggcgagaactggccgaacgaggttggtcagggcgctaagggtacttccggcgtgatctccaccgtgcagcaggctgacggcaccatcggctacgccgatgcttcccaggctggcgagctcggcaccgttgcagtgaaggtcggcgacgattacgtgccgttctccgctgaagccgctgccaaggttgtggacgcttccccgctcgacgaatccgccactggcgacaaccgtgtggtcgtcaagctcgaccacaacaccaccgaggctggcgcctacccgatcgtgcttgtctcctacgacatcgcttgcccggcatacaaggatgccgacaccgccaagttcgtcaagtcctggctcacctacgtggtcagcgacgaaggtcagcagaccgctgcctccgcagcaggctccgctccgctgtccgacaccatgcgccagaaggtcctcaagtccatcgacgccatcgaaaccaagtgagctttgatacagtaagcgataggctctcggtgaacggcaactgaccgtctgtttcaggccgcagccgcaacatgaaagcgggtgcggcctgaaacggtacctgcaggtaaaacaaaaaacgcagtcatcgcaagtaatcgcagatctgtttcaaacaatcgcaagttaaggagaacccgtgagttcgcaaagcaaaacggcacagcagccggtgagcggcaaaaacgcggataaggtgttcaagggcgtggcctacgcctgcggcatcctgatcctcgtagtgctcgccgccgtcgcgctgttcctgctgttccgcgcatggccgttgatcggcggcgatcagcaggccaacagcgacaccatcagcaacttcaccggcggcaaggcctccagcttctggggctacgtcggaccgctgctgttcggcaccgtgctgatctccgcgctggcactgctgatttccttcttcgtgtcggtcggcatcgcactgttcatctcgcactacgcgccgaagaagctcgccaccgccttgagctatgtggtcgatctgctcgccgcaatcccgtccgttatctacggtctgtggggtggcctggtgctggtgcccgccatctacccgttctggaattgggtggccaagtatcttggctggattccgctgttcgcaggtcctgccgccaatccttcccgtaccgtcgccaccgtggccgtggtgctcgcagtcatgatcctgccgatcatcacctccatgtcccgcgatatcttcctgcagactccgcgccttcaggaagaggccgcgcttgctcttggcgccaccaagtgggaaatggtcaagcttgcggtgctgccgttcggcaagtccggtgtggtgtccgcttccatgcttggcttgggtcgtgcgcttggcgaaaccatggccgtgctcatgatcctgtctccaggtctcaactactccatcaagctgctgcaggcttcgcagaaccagacgatcgcagccaacatcgccgcgcagtatcctgaagccaacgatctcggcgtgtccgtgctgatcggcaccggcctggtgctgttcctcattactttcgtggtgaatttcatcgcccgtaagcttaccgagaaagcgagtgcgtgatgaccgcagtgaataacaacgcttctccgatggacggtgcccccgtcatcgatttcgacaagttcaagccgacgcgttcctttaccgctgcacgtaagcgcaaggatcttgcgatgcgcgtactgatcgctcttgcgttcattgtggcgctgattccgctgttctcggtgctgctcaccaccatcgtcaacggtgtcaagaggctgaacctcaacttcctgagctataacatgaccggtgtggtcggcggcaatccgacgccgtccggtggctacggcggtattcagcacgccatcatcggtacgctggaaatcacgttcggcgctatggtcatttccattccgatcggtctgatgtgcgccgtgtacttggtggaatattccaaccgtggcaagctggctcgcgtcatcaccctgctggtcgacgtgatgagcggtattccgtccatcgtcgcaggtttgttcgcattctcgatgttcacgattctgattggacctggcaccatcaacggtttcgaaggttccgtggcactgtcgctgctgatgctgccgaccgtggtcaagtcctctgaagaaatgttgaagatcgtgcctcacgacttgcgtgaagcgtcgtatgctttgggtgttaccaagcagcgcacgattacgaagattgtgttgcgtaccgctttgccgggcattgtttcgggtgcgattctcgccgtcgcccgtgtgattggtgagaccgctccgttgctgatgaccgcaggctacatcgcctccacgaacgtcaacctcttctccggccagatgaccacccttccggtgtacgtctaccaggagtactccaagctcaacgcgaattgcccggcttccgccgacgcttcctgcgtgaccaccatcccgatggaacgcgcatgggccgcggctctcgtgctgatcctcatcgtgcttatcctcaaccttatcggtcgactcgtggcgaaggtcttcgccgtcaagtcggaacgatgagcggtagtcttacatacagaaacaacatataaggaaccaaaatgggacaacgtattgatgtcaatcatctgaacatctactacggcgacttcctggccgttgaagatgtgaacatcaacatcgaagccaacaaggtcaccgctttcatcggaccttccggctgtggcaagtccacggtgctgcgcacgctcgaccgcatgcacgagatcattccgggcgctcactgcgaaggcgaggtgttgctggaaggcaagaacctgtacgacaaggacatcgacccggttgccgtgcgtcgcgatgtcggcatggtgttccagcgtgcgaacccgttcccgaccatgtccatccgcgagaatgtgctcgctggcgtgaggctcaacaaccgcaagatctcgaagtccgatgcggacgatctggtcgaatgggctctgcgtggcgccaacctgtggaacgaagtcaaggatcgtcttgacaatcctggcattggtctttccggtggtcagcagcagcgtctgtgcatcgcccgcgctgtggccgtgcacccgcaggtgctgctgatggacgagccgtgctccgctcttgacccgatttcgacgctggctgtcgaggatctgatcaacgagctgaagaacgactacaccatcgtgatcgtgacgcataacatgcagcaggctgctcgtatcgccgactacaccgccttcttcaacctgaaggccgtcggtcagccgggtcacctcgagtacttcaccgacacgaccaccatgttcaacaacccccagaacgaagaagccgagcgctacgtatcgggacgctttggctgatcggcaaaagccgatccgccaaagcgtagcgttgacccagtgggtcaacgcaagcgagctttagcgagccagcaaattatgtttcgctttgcgaagctccttaattgcacgcggctgatcggcaaatcatctcttactcccgtttgcgggggattgtcgcacggatgtgcggtcgaaagtggttgcttcgctaaccatttcgatcacattcgtggcggccgttcccctgagcgggagttttttgtatgtgatacctgatcgcgacacgctctattgataatgattctcaattaagttatgatggcgttatatcacgttagggaggatctatcatgtaccgtattgtgagaattgcgattgccgcacttgcttctgtaggaatgcttgcgtcggttgctgcgtgtggaagcggccgatcgtcgtccgaaaaaaacggaaccatcgaagtggtcgcttccgtgaatcagtggggtaccgtggcgaaaaccttgggcggtggcaacgtcaacgtaaccagcatcatcaattccaccaatgtggatgcgcatgattacgagccaacgacgtcggatatcgccaaactgcagaaagcgcaagtcatcatcgtcaatggagccggctacgacgcatgggcggtcaaagcggcgcaatccgccaacgcaactatcgtcaatgccgctgcagtcggcggggtgaatgacggcgaaaatccgcatgtttggttctccgccgatgtgcgcaaggcagtggcacaggcgatcaccgaagcgtacgaacaggccgacgccgcgaaaaagagtgatttcgacaagctgcacgatcagtggaaatctgaagaaaacaacgtcgaaagcaaaatcgccgaagtgaaacagaaatcggacggattggcgtacgcggcaacggaatccgtggcaagctatctggcggaagacatgggtttgaccgacgcaacgccaagcgggtacgcgcgagccacagcgaacgaaagcgagccgacaccaacggatatcaaacagttcaccgatgcgctgaaggcgggtgaaatcaagcttttggtcgtcaatacgcaggaggaaagcgagctgacgggcaaaatcacgaatgccgcgaaatccgcaaacgtgcccatggttgaactgaccgaacagatgccggaacaatacgattccttgacggcctggatggaaagtctggttgacgccttctcgcaagtcatcgcgtaagtcagttcaataaaaagtaatacaaaaacaagcgatacaacaataggggcgactccgcagtgagagcggaatcgcccctattccatttgccgaatttaaatttatttactgaaccagtaatttcggctggtggtcaggttgaacctgacgttcagaactacaggatcgcggtgatgatgaagtccagaatgaacagcagcgacacaacccagatcaccgggtgcacttccttggccttgcccttgcaggtcttgatcaggcagtaggtgatgaagccgccggcgatgccgtaggagatggagtagctgaacgccatgaatacggaagcgaagaacgccggcacggcctcggagatatcgccccagtcgatttccttcagcgaggacgccatcatgcagcccaccaccacgagcacgcctgcggttgcggcggacggaatggcggagatgaccggggagaggaaggcggacagggcgaagcagatggccacgaccacggaggtcaggccggtgcggccgccagcggcgatacctgcggaggattccacatacgtggtggtgttggaggtgccgcagatggcgccgatggaagttgcgatcgaatcggcgaacagggccttgtccatcttggaggagaagccggaaccgttttcgagggcttcctcgtcttccgcggagaagatgccggtgcggcggccggtgccgatgaacgtgccgatggtgtcgaaggtatcggacatggagaatgcgaagatcgtcagcagaatgatcggcagcttcgacatgtcggagaacagcgatgggaagccttcagcgctgaagatagcgccaaaggtctgcggcagctgggcgaaagtgtcgccgatggagatggagttggccatggtggtctgacccatcggaatgccggcgatggcggtgaccgcgatggcgatcagcatgccgccgcgcaccttgagcacggtgaggatgatggcgaggaacaggccgatgatgaacagccagatggtcggattattcatgacggccagacctggggtggcctgcacggtgtcgccgttcttggcgtcggccttggtggtgaaggtgaagaagccgacgttcaggaagccgacgtaggccacgaacaggccgatgccgccgccgatggcgttctgcagcacttccggaatggcttggatgatgatcttacgaatcttggtgacggtgatgagaatgttgatcaggccacacaggaacaccatgcacagggtctgctgccaggtgaagccgaggccgaagcaaacggtgtaggtgaagaacgcgttgaggcccatgccggcggcctgagcatacggaacgttggcgaacaagcccatgacgagcgtgcccgcgatggctgcgatgatggttgcaaggaacacgccgccccacggcattcccgtttgcgacagtatctgtgggttgacgatgatgatgtacgacattgcgaagaacgtggtcagaccggccatgacctcagtggacacggtggtgccgttctccttaagatggaagaacttttccatttttccctatctctatttctcttgggttggtaggaacgttccgactattgggcggcgcgttccggcgagaattgcgactcgccttgtggaatcgtgggattccgaacaaggcttaaccgtaacacttgagtgagtcatgaagatttcgtaaagcgcgacacgcccggatgacggcaagtccaagcatgaccgtaagttgttcacctgtaaaccacagaccgttggttggagcgtgcaagcgctcacgaagtttggttcgccaagccaacgcaggttgaagaacatacgcccaccaagggctttccgcttagcggtcgaatgttgctctgcctgcgtgcagggcttttttattgtccggcgaaacgttcctgcttcacagtcaatggttgactaaggaaggaacgccatgaagaggcccgaaaaggaagcggtggtcgcccagcttacggataagttccgtgaagctgacgctatctacctgaccgagtaccgcgggcttaccgttccgcagatctctgaactgcgcgaaaagctaggccgcgatacttcctacactgtggctaagaacacgctgattcgcatcgcagccaaggaagctggcatcgaaggtctcgatgagatcctcgccggtccgaccgctgtgaccttcgtgaagggtgacttcatcgaagctgcgaagaccctgcgtgacttcgccaagaccaataaggcactgatcatcaagggcggcttcgctgatggcaccgtctacgatgctgaaggtgcccagaagctggcagacctcaagtctcgcccgcagctgctcgccgagttcgccggcgacatcaaggctacgatgtccaaggccgcgtacctgttcaacgctctgccgaccaaggccgtgcgtacgatcgatgcgctccgcgagaagcaggaaaaggctgcctgatttcattgcggttagccgcgtgaatgatagtgaccataaaagaaaaataattgttttaggtgacggtcacctcttcaatcaaaccgtcgccaagaatgaaaggaagccattatggctaagtacaccaacgatgagctgctcgaagctttcggtgagatgaccctggttgagctctccgagttcgtcaaggctttcgaagagaagttcgacgtcgaggctgccgctccggctgctgtcgccgttgccgctccgggcgctgctgctccggctgaggaagagaaggacgagttcgacgtcatcctctccgccgttggcgacaagaagatccaggtcatcaaggccgtccgcgctatcacctccctgggtctggctgaggccaaggctctggtcgacggcgctccgaaggctgtcctggagaaggccaagaaggaagacgctgagaaggctaagtcccagctcgaagaagccggcgctaccgtcgagctcaagtgattcgcgcggcttgaagccgcatatcacaatcttgagtggaaaccccgttcgccacaaggcggcggggttttccgcatattacgggattttctttcgctgacgatccaataaaattcgatttaggcatgaatgcttccatatcgtgccatacaatgggggaattaggcgaaagttgtcaattaatcgcgtcataatcctgaaatacgtggcaaggcatgacacaatgacaagtagtgttatgtgtgaaaggaaggccgacaacggtgagcgaagatcaacgaacggcacagcagtggaccgtcaaggttgatggaaccgaactgaagaagctgagcagcggtgaaagcgtggaaatcggccgcaagccgttacgtcctctggcggatgacggattcgcgcgccttgacattatggatacgaacaaatccatgtcgaaacgtcatgccattgtttcagtcgacgcgcagggcaacgcttccgtacgtgatctcaggtcgaccaatggttcgtttgtagtggctgacaacggccaattgatgcgtctgcctgcggatgaggacttcaaactgccatccacgccaatgaccttgcaattcggcgacgtacgcgtcatttttgaacgtgacagcgtgagcgccatgtccgaatccgagagtaccacgtcagctccggtatctaatctgttctcctatgcagtgtccgatgaggcgtcgcaggagcccgacgccgccgatatgtcggtcgacgacattctcaatctgcgtaccggagagccgaccgcattgttcaacgcgcgcaacgtcgccaatcgtgtgaatctcatgcaacgctccgaacgtcagtctttcgcgccagttcgatccaacgagccggattatggggatctcccgtccgtttcgctggtgcagcataacgacgtcgtggataacgcgccacgtgacctcttcgccgacgccgcagccgaggcagatgccgtggcggaacagcaggcggcggaagaagaggccaagaagaacgccgccgaaaaggaaaagccggctatgctgcccgaatcccaagtcatcgcaggcaacgacgtcgaacacgacacgattcccgtgagcaaactattcagcgcaagaccaagcaagccgattatcgtggcattgccggatagcagcgacatgcctgaacaacaagcggaaaaaacgcacgagcagcgcaatgaaattgcagaacaatccggtaccaatccgattcaaccggaagaagcggcgcaacgggccgacgacgagcgtttcaggccgcataacacggagcagccacagattgtgagcgagccgacaccggacgaaaccagcgtattcaaaccggcttttgaacctggatcggtgttcgatcgagtcgccaagggagagcttgccaagcaggaacagaccattgaagtcgacggactgacgtcggatgatgccaaacgcaccgacgatttcaccgtgcagttcgagatggcacgtcatccggagctgctgccgtttctcgccatgaacccgtcgctgtacgacgatttgtacgcatggctgggagctttgggcaatgcagacatcgacgcggccctgtcacataatccggggtatgcggaataccgcaaagcggtagggaagtgagtcaatacatgagcgaaagcaacgagaccgtcaccgcgctggatcgtattcgggggtggcgtgagaagtaccgtcttggtctatcgccgtcgccgcttgaggacgtgacgcagctgagcgcccagcttgacatgacgcatgcgcatccgtccggcatcgcgcagctgttcgccagcgggcatgtgcaacttgattccttgttccgcgacaacggcatgttgcgtgccgccgggcgtcgtgtggagcgtgtgctcgacgatcgtgaggcgaaaagccgtgtcagcggcgtgggcgaactgtctttggtggttggcgtggccatctggaaaggcaaccagatgccggtactcatgtatccggtcgaggtgcgcaaagaagggcgcaatattgaaaacggcacggtgatcgcgttcacagggcgcgtacgcttgaatgcggctttcgccgccgtgctgcgcgagaacaacgtcgtattggacgagtccaagctgttcgacggttcgaattacgaaagcggcacgccggaaacatccgcggtgttcgctgccatcacacgccttgcggccaacgcgttccctgattttgagatcgaacggcacattattctcggatgctttatggatccggcatcgcagatgctggtggaaagccagaagatcatcgaccagttggcgcaaggtccgaccggcaataccgccttggacgctttggcgggagacaagtccgccgccgaagcgttggaaggtgccgaaattccggagtacagtccgttcgatgccgatcctcatggcgagtatgaggtcggtgatgcggacaataccgtccgatacgcctcgcagcttgcttccgcgggccattcgctgtttgtggatagtgcgatcgccaacaataccgccgagcaggccgcggcgattgcgtcgcgttgcgtgatgaatggacggtctgtgctctatgtgccgtgtgtgaccgatcagaagcgtcgttttgtacaggccgttgccgcaaacgaaatgagcggacagctgctggatatcgccgatgatggtgccaacgctgcgattgaccgtcagctgattgcagccgtcggcttccaatcgggggttgcttcctcccgttttgatcagattgccgatgagctggttggcgtgcgttcgcgtttgacccgttatctgggcgatcttcacggcgtgagtcaggagtggggtgtatccgcctaccagacgattcagaatctcgcgcagattgcggcattgcccactcatccgaccacgcatgtgcgtttgaacaagcagaccgcgcattccatcgcggacaagatcgaggattgggctgcgaaactgcagcgtgcgggcgagcttggcgaatacaccattacggagaacgacaccgcatggtataaggcatcgctgtattccgaagaggaggcggtgagcgcataccagcgtgtggttgagctgttgcgcaaggtgttgcccgccacccgcgagcaggtggccagtacggtacagacctgcggattcccgattcccacgaccgcgcaggagtggagccgtcaggtcatggtgctgaagaacctgcgccgtgtgcttgacgtattccagccggagattttcgaacgtgacattgcatccatgatcgaggcgaccaagccgaaggccgagcgcaaggccgaaggtacgtccatgggcttctgggagcgtcgccgccacatcaaggaagccaagggtttgctgcgcgtcggtgcccaagtggagaacctgcatgaggcgttgctggtggtgtccaagcaggccgatcagtggcatatgttcgtgcctcatggcggctggccggtattgcccgccaagctggatgacattatcgaaacgcaggagaatctcaatcgggatatgaccgcgttgaatgcggtgcttgccacaactccgcagggcggcaatcttgaaaccgttgatttcaatcaggtcgaagagcgtttgaaggccctgtatgacgataagcagtcgcttgatattctgcctgagcgcgcccgtctggaacgtgaattccattcggtcggcctcgacgagctggtcgaagatctgaacaatcgtggcgttgccaacgatgccgttgcaggggaactgcagctggcatggtggaccacggcgttcgaagacatcgtgaaatcctccgcgatcatttccaatcaggatgggtcggcattgcagggcgctgcggagcggttcgcccaggtcgatgtggaacatgtgcgttcggtcggtccgatggtggcgcaggaatccatgcgccgtctgtgcgacatgctgttctcgcgtacgcaggaggccaatctgctgcataccacgcttgccggcgcccgtaatgtttcgctgaactgcctgcataaggagcatccgcagattctcgccgcggcgaagcctattctcgttgcgactcctgccacgcttgcggccatcaccgatccggcgccattggccgacgtcgtgatcatcgatgccgcagcgcatattcaatccatcgaactgctcagcatcatcagccgagccaagcaggtggtggtgatcgcgcatcgcgaaaccgtcacttccgacggtctgaagcgtctcatcgcattgctgccgagcgtgaaaatcgccaatcgtcctgttcgccgcgcgccgaagctcaacgcgttcctggaatcggaaggctacggttccgtgcccttcgacgtggccagggaaggcgcgcagggcgaggtcgcctaccattttgtggccgatgccaatggcgtgccggtcatcacgtccggactggtggaaagcagccagcaggaaatcgacgaggtggtcaggctgatcaccaagcgtgccgccggtttcacgatcgtgcctgcatcgtacatgcttaccgtggtgacgctgacccatacgttccgcacccgactgggagccgagcttaaggcgatcgccaataagaacaaggccatgggcatgttcttgcgtcatgtgcgcatcgtggacatttccgatgtggccggcgcgcatgccaccgatgcgattcttgcgatgtgctacgcgaagacttctcatggaaggctgctgcaacagtttggagcgttggaatccgaaggcggacggggtatgttgctggatgcgttggccgtgccggatcgtcatcttgacatcgtgtccgcattctcgtcagctgacatggatgacgagcgcctgcaccaagctggtccgaagatgctgaaaacggtgcttcgctgggcggaacagctcgatgacagcgtggtgcgcccagtcgtcaagacgaacggttcgaacgtattgctcaacgatcttgccgaccgtattcgtgcccgcggtttgaatgtggccgtcgactatggtttcgacaatggttccaagctgccgctggtggttggcctgaacgacaagccgttcgcattggccgtgcttaccgacgatgcgcagttcatgggattgcagtccaccagggaacgccaccgcgtgcttttgcagaacatcgaatcgcttggctggtccgttatgaccgtgtggagcgttggcgcgttcgtgaatccagacaaggaagtggatcgcatcgtggcacgcttgagcgacctgtatcaggaggtcaagtgagcgtcgacgaaccctccatccaagagtccgcggaatctggccagtctgtcgtgcgtgtggtgtccggatactccgccacccgccgtacggcgcgcaaacacaagcgtgtggttcggcagggtacggaactgttcgatgccgatggcgtcaagcttgaaccgtccgatgtgcttaccgaacgccagcgcaatgctgacgacgacaagcgtattctgggcgagctgccaccgcattggggcgtgttctccgagcgggagcgctgacgttcgtctgctatacgggaggttctgatacgttcagacctcccgaatttcatatattccgcatgatggtgctgcggattcgcttgggaatgccgttacgaaccgacgatggcgatgatcgcactgtattcttgggcctgcaatacggttgccgcctcatgaggaggcatggcaaacaccgcaagcgtgttgccgtccgcattccgtgaaggtttcgcggtcaatatcgctcccgtgcacagctcacgcaacgacaccgcatccatatccggtaccgtttccggcgtggcctcgctgaacatcgtggcgctggaaagcgtcaccgtatcgccaatcgtcagactgtcggcggaactcgccaaccgaacttcgaccgccgtatatcctttgggaacaacgggggaggcgcgagccatggccgaggtgacgatgctgccttccgcaatatccacttgggcaatcagcccgacggcatcatcgatatcgtgagcaacgctgcgcagggcctcatcgtatggaatatctcgcagagcaagcgaatccgcggaaatcacgccgcctttggcgatggacttcgccgcaatgacgacggattgcgtggaaatcgtcaatcgcacgcactgcagggccgcgaatatggcaagtccgacgcacagcgaagcaagtagacgatgcaattgcgcgttccgtcgtcgtcgatgaggcgccgaagacggtgcgcggttcgtgtgtttgccgtccgtgccttgcagacgttggctaaggtcatgaaaaaaggtcaccatgcatgcatgatgaccttacgaatagttgctgcgcaagccggatcgagggttgtggtcggaggatgcgagttatccacaggattcggcgtgtcgccttgttttccaaggtttgctgaccctggttatttggctcgtttccttgcttcggctgctcggttacgtgtattcgttttcgctcacttggacttgtcggtgcgatagaaaccagatcccttgaattcgatcggcggggcggaatacaccttgcggacctgctcttcgccgcattccgggcaaacggtgatcggatcgtcggtgaatgactgctgttcggtgaaatcgtagttgcagttcttgcaacggtaatggtaagtaggcaaagtatcctcgcttcaaccaggttctcaaatttcttaacgggacatatcctagtacgttccctgagacggctgcgtgaacgtcttatcttcggacgtcttatcttcggatgtcttattcgcgtatggccgtaaatccgttcggagtgagcacgccatcgacgggaatatcgtggtcttcgtgcggaacaggcttgtccgtcggctcccacggccagcaaaccgccaccgcccgtgcgccggccgcacgatactcgagcgcgcggtcataccaccctccgccacgtcccagacggaatccctcttggtcgacggcaagggcgggaacaatgatcagaccggcgtttttcagcgcttcaggtccgtttgcgctattgcccggctcttgcgggcggtgcgtattgatggacccgtcgctgttggtctggtcctgcagatcgtgaatgtcgccaagttcgctccagccaatatccatgccggatccgagccgtggcaccagcacgtggcaattcgaatcgaataatgcctgcagcatcggcatcatcgacatttcgctgcccatggacgcgaatgcggccaccgtggtgaacgaatgaatgagattcgccttccgcgcctgttcggccaacttacggccggcttccagtcgttcctccttactggtctgctttcttcgtgcgattgcgtgtgcgcgccattgctttttcaactcacgttggttcgcggcttcgtcacagacgctgttttccatgacgtcggcttgcatgttcgtggtcataccgcatgttgtaccacgggatggttgcgcgaaatcggaaatgttatgcgtatggcagaatgagggcgtgacgattttgcgatctttacggggcatgatgcgttcggatcccaatgccattgatgttccgaggttcattcaggcacatgggcttcacgttcccataatcctgcgtccgctgactactgacgactgcgacgaatggaacgaagtccgctggcgcaacgacgattggttgaagccttgggaatccggggatccggtgcatggcgcgtcgatgtcgttcaacgagtgggtgcgtgcgatgcgacgcaacgagcgaaacggcaccggagtggtgttcgccatcgagcatcatgggcgtatcatcggccagatttcgttaggggccatctgctatggcgccatgcgtaccggcgtggttggctattgggtcgatgagcggtgtgcggggcgtggatatgcgccgatggctgttacgctattggctgattgggcgatgttcgacccttccggaccgcaattgcatcgtgtggagatcgacttgcttcccgaaaacgaacgttcacgtaaggtggcgctcaaagtgggggcatcctatgaggggatgcgcaaggcgtacatgttcgtgaacgggcaatggcgtgaccatgaatcgtatgcgttgctgccggagtgcgcaccgaatggctttaccgcacggttgatgggcgagtgagccgttggcgaggttcgacacgcgctttcgcgcacatgttcgacacgcgggggcgtgcaccccggagaatgtcggaatgtcacctattcttatgagttatgggttatgaatcgttaagcacggttgtggtgcttgcgattgtgattattctcatggttttctggctgcccaaacggacggtcaaaggcatgaagcgggtaatcgagcaccgagaggaccgcttttcgccgtcgctgcatctggtggatgccgacagtggaacgcgattctccgatgagaccgccgcaaaggcgaaaggggcaataatgcagtccaacgagacgcatgagggcaagctgaccgacgaaaggatcgcgcatgtccgtgcccttcgtcgtgccgcgatccgcagaaggcggattattgttgtctcgatgctggtgatcacaatcgtcgtgttgatgtgtgcgtttgtgttgcatttcagtccgttgtttgctttgattcctgcggcgctgcttgctggagtgctcgctttgggggtgagggccgccaagcaggccgcagcgtgggagcggaaagtcgccaagtatcgttccaagatgaggaagcgtgctgcggcagagcgcaagcgcgcccaggaagagcaggcggagcgcgctcgtttgcgggagcaggagcttgcggaaattcgcaggatcgccgaatctcaggtgccgaccgatgttatgccggaaggtgagatccgtcaggcgatcgatcgcggcaaggccgaccgtgatgttgttgtaagcaaacgcaaggaggaaaccgaagcgaaatccgctgcggaaccgaacgttgtggatgcgcaagtcgtgccggataagaagaacggtctgtccatccacgatgagcgtgatgaaatcgccaaaaccgagggtgtggatgcatgcgatgcggattcgtccgccgtggccggcgcgtcgcaggatctgatttcgttctcgttgggatcgccacgcaacggtaacgatatcgcgccagccgctccggaaagcatggaaatcaagtccactcgtcaggtcgccaaggccgtgccttcgactgcgagtacggtttccgacaatgtcgagccgttgattgtgccgaccgacgcgatcagcagcatggattccgacgaggccgcagcccgtgtggaggctggtgtgcatctgcaggacgtggataccgtgggattccacgactccgaggtcagcgccgacgttgaggctcccagcgtcacctccgattccctgggtgtgggtttggcgtccatcatggcccgtcgcggggcgtgacggagggaaagcgaacgcacgaaacgcacgaaacatacgaacaagcgtaaagaacatcagcctgaaaccgcatggtttcaggctttttcgtatattttgctctcagcgttagcactcgagttggcagagtgctaataatcgcgctaggatatgtttcagcgcgaaaggacgacgccgtaagtgatcgtcagcctcttgctagcgggtcccggcgcggtaagtaacgatttctcttagaaagaggaggtccacagtgtcgatctcactcacaccgttggaagacaagatcatcgtcaagcaggcggaagctgaaacccagaccgcatccggtctgttcattccggacaatgccaaggagaagccgcagcagggtgaagtcctggctgtcggtccgggccgtcgcaacgacgccggcgagcgcattccggtcgacgtcaaggtcggcgacaaggtgctgtactccaagtatggcggcaccgaggtgcactatcagggtgaggattacctgatcgtctccgcccgcgatattctggccattctcggctgagcgtagcgcgtagctgtttgaagaccccgtcagcgaacgattggtgaacaatcgttgcgttggcggggtcttgttgatttcaagcacttggggttcctgcaataggccgtgcgcggccgatgtatgccgtgttcattggcgttggcgtgctggtgttggcgtcgctgttcagatggtctgcagggaaggttcggaagaaatactcgtgttttttctttttggaatttttttcgggaggatttgctctgattgacaccgacatgtggctgatagtgagaaatcgttggaatttcaacgattttgagactttttggcttccgcgacacgccgtatttgcgttaatcgcatgatctgtggcatactaaacgggttgccggttggggttcaaccaaacaggcagcacggcggatttcccaagcggtcaaagggaactgactgtaaatcagtcgcctcgtgcttcagtggttcgaatccactatccgccacgcctcgatagctcagtggtagagcacttccttggtaaggaagaggtcgtgagtccgattctcactcgaggctctcatggcgggatagctcagctggctagagcgtacgactcataatcgtaaggtcaagagttcgagtctctttctcgctacaaaggtcgacggaacgtcggcatagcaacgaaccacaagaggtgaacttaaatggcaagcaagagcgccgacattcgtccgggcatcacgctggcatgcaccgagtgcaaggagcgtaactacatcacgacgaagaaccgccgtaacacgccggatcgtcttgagctgaagaagttctgctcccgctgcggcaagcagaccgtgcatcgcgagacccgctgagcgagttcaaagctttatgaaacccgaccaatatggtcgggttttttgttttctttcaaccttttcttgacacctttccaactgccttccccacacgctaagctaagcatcatgaccaatttcgcagatctcacgaccatcgccgtaggtgggccaatcgcatcctttatcgaaccgacctcgcgtgtcggcgttatcgaagccgtcgaggatgccgacgccaaaggattgccgctgtgcgtgatcggcggcggatccaatatgctcgtggccgacacgccgttcgatggtgtcgtggtgcgtgacgcgcgacacgccgtaagcgtgcttgatgaggcggctcccgtcgaaaacggcgaaaaaatcgtgcatgtcaacgccgaagcgggttgcaattgggatgatttcgtcgactactgcgtcaacctcggcttggagggcgtggaaggactctccggcattccaggcactgtcggcgcgtcggtcgtgcagaatatcggcgcatacggccaggaagtcgcatccagcgtcgaaagcgtggaggtctgggatcgcaaaaacaagcagaccaaggagctcaccaatcaggaacttcatttcggctatcgcatgagcgcgctcaaagcgagcatgtacagcgctccggcaacgcctgcggccgacttcttcccgacaccgcgctacgtggtgttgtccgttactttcgcgctgcatcacagcgaaaccggcgtagttggctacggccagctcgccaaagcattggacgtggaagtgggcgaccgtatggcgaccgcggatattcgcaacgccgtgttgaaagtacgcgcctccaaaggcatgcttgaagattcccatcgatatctgaccgaagccatgcgaggcaccaaaaagagcgaactggtcgccatcgcgcatgacgcacagcgcacgcagacaggcaacgatgaacccgactacaatcgccacagctgcggcagcttcttcatgaatccgattctcaccaaagaacaagcggcaaagcttcccgaagacgcgccacgattcgacgcgaccttgccggatggcacgccgggcgtcaaaacatccgcggcatggcttatcgatcatgcgggattccataagggctacaaaaccagcggaaatgccgcagcggggctttcgaccatgcatacgctggcattgaccaaccgcggcggagccacagctgcagatatcgcggaacttgccaaaaccgtgcaggatggcgttgaacgggcattcggcattcgtctcgttcccgaaccggtcgtcatcggcatgagccttaagtaaacgtaagaacgaagggagaagggaaacgcaatgaacgtattacgtaagaaatccgtcgagcagacgctggcggaaacagaggagtcggggcgctccctgaaacgagacctgacctggtgggatttggccattatgggcgtggccgtggccgtcggcgcgggtatcttttccatcggcgcgcaggcggcagccttccatgcgggtccggccgtgatcatcagcttcctcatcgccggcgtggtatgcggtgcggccgtaatgtgctacgccgaattcgcgtccatgattccggttgcgggatccgcctacaccttcacctacaccaccgtcggtgagatcgtcgcgtgggtgatcggctgggatttgatccttgaaatgctgatggcaggctccgtcgtctccaaatattggggcgtctatctcaacgatttcttccgacttgtcggatggaatatcaataccaacgtcaccatcggatcattcaatttcgatttcgcgccaatcatcgtcgtagctttcttcacggcactgctggtgtgcggcacgaaaatcggcgcacgggtcgacggcgcgcttaccatgctgaaaatcgccatcgtgctattcgtggtaatcgtcggattcttctacgtcaaagccgagaacttcaccccattcattccaccgagcgaaccggcgaccgccaccggatccgggttggccgcaaccatggaacagccattgtggcagtgggccaccggcatgacccccagcatttacggcattgccggcatcatctccggagccgcgctcgtgttcttcgcgttcctcggcttcgatgtggtcgccaccacttccgaagaaaccgtcaatccgaagaagaacgttccgctgggtataggcgtgggcatgggactgatcatcgtgctttacaccctcgtcgccatcgtcaccaccggcatggtctcctacaaagacctcgccaagcagaaagatccgtcgcttgccacggcattcgaaatggtcggcgctgactgggccgccaaaatcatcagttttggcattgtgatcggcctggccaccgtggtcatggtgctgctgctcggcctgacccgcgtggtgttcgccatgagccgagatggcctgctgcctcgctcgctcagtcacacgggcaagcacggcactccagtgcgtctgcagattgccgtcggcgtggtcatggcactcatcgcagccagctgcaacgtcagtatccttgccgacatggtgaacatcggcacgctgtcggcattcacccttgtttcaatctctattccgatcatgcgcaagaagcgccccgacctgaagcgagtcttcaaaatccccggcaatccatgggtgcctatcctcatcgcgctcgccaacatctggctcatgctcaacctgagcgtgctcacctggattcgattcgtggtctggcttgcggtcggcttctgcatctacttcggctacggctaccgccacgcccgacttggtacgggagagctggaagttggcaatcaagagtagtcttgaacggtaagtgttaaggaggtaaccatgccatacgttgtcgctcagccgtgcgtcgatgtcaaagacaaggcctgcgtggacgaatgcccggtcgattgcatctacgagggctcccgttccctgtacatcaatccgaacgaatgcgtggattgcggcgcatgcgaaccggtgtgcccgactgaagccatcttctatgaagatgatctgccagacgagtgggcctggtacaaggatgccgcagtcagcttcttcgctgaagtcggcgatatgggcggcgcttccgcagtcggcccgatcggcaaggatccggagcaggtagctgctctgccgccgcaaaatcagtgatcggcatttgaaagcggccttttcccgttggaagaggccgcatattttttgtttatagaggattataaggagttttcacgatgggctttcatgagttttcttcgccatacgattggtcgcgtatcgcagcatacaagcgcacggcaaaagccgcgttcggaggcatgatcgacctgtccgtgggatctcccgtcgatcccgtgcccgactcggtgcgcaaggcgctcgcagtggcggcgaatgatccgaatgcgtatggatatccggctactgcaggtactgccgatttacgtgccgcgattgctgaatggttttcggcggctcgcaatgttgatttgcaggcgatccatgctgatgtggtgcctacagtcggctccaaagagggtgttgcgttgatggcgtcgctactgcatttcggtgaggatgatgttgtggtgcagccgaaggtttcgtacccgacgtatgagatcggcacgcagttggctggagcgcaggtgcttaaggtcgacgatgtggctgatgttgcgtcgtggcgcaatgtgcctggcgtcaaagcggtgtgggtgaattccccttgcaatccgacgggcgaggtgtattcggccgagcggatggctggcattgtcgcagctgcgcgtgagatcggcgcggtggtgctttccgacgaatgctatgcgctgatgcagtggaggggtgctgtgaatggcgctgaaggtgaagctgattcacttgcgtcgacgccgtgcgcgctttgcgacgatgtgtgtttgggctccgccgagggcgtgctggtgctgtattcgttgagcaagcagagcaatatggctgggtatcgtaccgcgttcattgccggagatgagtctttgattgcatcgatgagtgcatatcgcaagcagattggtcagattattcccggtccggcgcaggctgcgatggctgccggattgcgtgatctggaatccgtcaaggttcagcatgcgcgctatcgggaacgtctcggcgtgttggtgagcgcgttgcgtgcttacggatactgcaccgacatgccggatggtgcgttgtatgtgtgggtgagagccaagtcgggcgattgctggaccgatatggagcagcttgccaagatcggcatcatcgccagccccggcgagttctatggtgcgccggaatgtctgcgtttctccgccaccgccagcgacgaggcgatcgtttccgcagctgagcgcttggcgcgctaagccgatatgcaaaagggcttccggcaatcgctggaagccctttatcggcggagtcagagggagtccaacgcccatgcgtcttatgattatgcgcagctgttgatgtcgctgatggcaaagtgaacggcgtaggctaggccgcagggcgtcgtccctagtttacttaaatctattcgaaagtttcgtaaatatttgcatatagaactttcgtaacaaaaattttaagtatttagttaagtgacttgactttcttgaaaatcaagtcatataatcaagcaatgctttgactgaaatgctaaagcatttacgaaacatgaagatgtgtgttcgtgcatgtcgccaaaggagaaagactttgtattcccacatccgatattggataaggagattcagcaatgaagtttgaataccatgtcaaaccaaccggcagcgatgctgcgtgcggcgacgcggagcatccgttcgccacgatttccaaggccgcgcagatggcctctccgggtgatacggtaatcgtgcatgaaggcgtataccgcgaacaagtcgatccgaaacgcggcggtctgagtgaacatgagcgcatcacctactgcggagccgaaggcgaagcacggccggttatcaaaggctcggaatgcgtgcagggctggacggaattggccgatcatccgcatgtgtggacggtggtgcttgataatacgatgttcggggatttcaatccattcgcgaccccgattttcggtgactggctggaaatgcccaagttcggcgaggatccggacaaacatcttggcgatgtgtatctcaacggtgtttccttcttcgaatcgacgacgttggaaggcgtatacgatccgcagccgcgtgatacggatgaggatttcgcgttgaagattccctgccctgtgccggatgtggaccgtacacgttatgtatggcatgccgaagtggacgagaatgccggcaccacaacgatctgggcgaatttccaaggtgccgatccgaatgaggaactggtggaggtcagtgttcgtcgcacatgcttcttcccttcccgcaaccatgtcaactacatcaccgtgcgtggctttgaaatggcgcaggccactggagattgggcgccgcctacctcgcagcagtggggcatgatcggcccgaactggtcgtatggctggatcatcgaagacaacgtgctgcatgacgccaaattctccgcggtgtcattgggcaaggaaatctcatccggcgacaacgagtgggcgaaaaccgagcgtaagaccggttaccagtaccagttggaggccgtgttcaaggcccgtcgcatcggctgggaaaaggggctgatcggcggtcatatcgtacgcaacaacgacatctacgagtgtggacagaatgccatcgtcggacatatgggcagcgcattctgccgtatcgagcataaccatgtccatcacattgcgttgaagcgtgaattcttcggatgggaggtcgctggcatcaaattccatgccgcattggatacggtcattgccaacaacaacatccacgactgctcgctgggcatgtggatggattggcagacgcagggcacgcgcatcacgcgcaatgtgttccacgataacgtccgtgacctcatgattgaagtgagtcatgggccgtatctggtggacaataacgttttcgcctcgccggtgatgttccagaactggtcgcaaggtggtgccttcgtcaacaatctgatttgcggcggcattgaaccgcataccgtccccgaccgttccacgccgtatcactatccgcacaccaccgaggtggccgggtgcgctgtggtgtccggcggcgatgagcgttggctgaacaacatgttcgcgccgcaaccggtgaaaccgactgtcggtgaatatggtttgtccgcctacagcgattgcccgatgtcgatgcatgaatacttggaacgccagcgggccatgtgggcagatccttcgcagggtggtggcgagcgcaatcctctgcagtctctatacgcgggcggcaacatctatctgtccggcgcacaggggctgaacaagcaggaaggtacagccgacgattcggagcgcatgcaggaggacgccccgttcttcggcggcgccgcctccacgagcgttgcgtgtgatgagcccatgccggtgacattggtcgaagaacccgatggactgtacctgcggtgcactgtgccacaggccgtcgccgataccaggatgcaggtcgtcaccagcgatatgctcggcgtgcctcgcatcgtggaggaacgctatgaacagcccgatggcagtgactatgtgctggacaccgacttgctggaacaagccttgacggcaacggaacgcaaggccggggcgttgaatggtcttgtctccggagagaatcgcatccgaatctgggaatggaacaactgatatgacaaatgcaaccgataccagcaagacattgggcgagtccatgttcgcacagtgcggatatgcccaggacgccatcgataagcgcgtgtcacaggtctggcatgaaattttcgaaggtccgaacaaattctattgggagaacgacgaaggtcttgcctatgtgatggacaccggcaacaacgatgtacgtaccgagggtatgagctatgcgatgatgatcgccctgcaatacgaccgtaaggacgtattcgacaagctgtggggctgggtaatgcgtcacatgtacatggaggacggtcatcatgcgcattatttcgcatggtcggtcgcgccggacggtacgccgaactcgaatggtcctgcacctgacggcgaggaatatttcgcgatggacctgttcctcgcctcccgtcgctggggtgatggcgaggatatctacgaatattccgcatggggacgcgagatcttgagatattgcgttcataagggcgaacgctacgacggcgagcccatgtggaatcccgacaacaagctcatcaagttcattccggaaaccgagtggagcgatccgtcctaccatctgccgcacttctatgaagtattcgccgaagaagccgacgaagaagaccgtccattttggcatgaggcagccgccgcaagccgtcgctatctgcaggcggcctgcgacgagcggaccggcatgaacgctgaatacgcggattatgacggaaagccgcatgtcgacgagtccaatcattggcatttctattccgacgcctaccgtaccgcggcgaatatcgggctggatgcagcctggaacggtccgcaggaagtgctgtgcgaccgcgtcgccgcgctgcagcgattcttcctgacccacgaccgtactagcgtctacgccatcgacggcaccgccgtggacgaggtcgtgcttcatccggtcggattcctggccgcgaccgcgcaaggcgcacttgcggcggtgcattcggcccagcccgacgcggagcataatgcccgtgaatgggtgcgcatgctgtggaatacgccgatgcgaaccggcacgcgtcgttactatgacaatttcctctatgctttcgccatgctggcgttgagcggaaagtatcggtatgaatgatgattacctcaactaatcctatggtctacacggattttcctgatccagacatcatccgggtcgggggcgtgtattacatggccactacgactatgcatttcacacccgggtgcgatattctgcgcagctatgacctagtgcattgggaattcattgcgcacgcattgaatatcgtggcggatacccctgaagaacgtttggaatgtgaaggtgccaacgcctacggtcgaggcatgtgggcgccgtcactgcgttaccatcggggcacctggtatgtgttgttcgccgccaacgatacgcatgccagctatctgctgacggcggacgatccatgcggcccatggcgaaagcgtgagcttgacggcttctattacgacagcggactgttctttgacgacgatgatcgagcctatgtcgtacatgggcagtcgacattgcgcatcacggagttgaatcctgaattaagcgggccgatgccgggtgggctcgaccgggtcatcgtacaggacgatccgcaggctgaccttggttatgagggcagtcacctgtacaagcatgatggacgctattacgtcttcacctgtcacttcccgcaaggcaagggcaaaacagaagcctgcttgatggccgaatccttggatggcgctttcgaagtgcgtgaaattatcgacgacgacctgtccttccacggttacggagtcgcgcaaggcggtatggtggacactccggacggcgactggtatgcattcatgatgcaggaccgcggcggtgtgggacgcgtgccgatactgatgccgatgcggttcggcgaggacggattccccgtcgtcggcgagaacggcaaagtgccgcagtcggtcagcgtaccggctgcaagctgtgccgaacctgtcacgcccatcaacggcagcgaattcatagcccggcataacgccgaaggcggagtcgatgccaactgtctgcagccatactggcagttcaatcacatcccacataacgaatactggtcactgacggaacgtccgggagcattccgcctgcattccggacgcatcagctcgaatctcaatcatgcatggaatacgctgacgcagcgcacgatggggccggtgacggtggccgaagtcaccgtcgacgcgtcgacattgcatgatggcgacttcgccggattggcggcgttccaaggatgctattcctacatcgcgcttacgcgaaggaacggccgcacgatgctgaccgtccaatacaagccggcgaatgacgattccatcttctccgataatgattgggacagtccagccgtaacggatgcggaaatcatggcggatgcggattgcatgcgcctgcgcgcggtatatgatttcaccgattgcaaggatgaagtgacgttcttctaccgcgatgcggatacgccggaatccgaatggcgtccattggggacagtgcaccggatggtcttcaaaatggatcatttcacaggttgccgtatcggattgttcctgtattcgacaaaagagaccggtggaatcgtcgatttttgcgactttgcgtattcgacgccggatacgaaggaaagagagcaatgaagcgacaggtcatagtggcgcaaggaactgtcgaaggcttggcggctgaagatcagggcatcaccgtgttccgaggggttccgttcgcccagcctcccgtcggcggtctgcgctggcgtgcgccgcagccggccctgccatgggatggtgtgctgcaagccttcgatttcgggcctaccgcgatgcagccgacgccgggcgcctccgatgatttctatgatcgtgaatggggcaccgatccggccgtgccgatgagcgaggattgcctctacctgaatatttggactccggcattacgcggatatggtgcggatagcatggtagcctccgaaaagctgccggtcatggtctggatctacggcggagcctatcaatgcggcggcacatgtgaaaaggaattcgacggcacacgtctcgccgcgaacggcgtcgtcgtggttagtgtggcctatcgtctgaatgcatttgggtttatgacgcaccctttgctgcatgaggaggccgtagaacgcggcgacggcgaaccatatgcgaatttcggattcctggatcagcgtgccggaatccaatgggtgaaggaaaacatcgcgaagttcggcggagatccggaaaacatcacggttttcggccaatcggccggtgccgccagcgtcttggcccagatctgctcgccgatgaatcatggcctgtttcagaaagccatcatgcaatccggcgcaggcctagggcatttcaatgcgcggcaggacacgctggagcatgcgcagaccaacggaatccgtctgttcgaagcattgggtgtctccacgctggagcaggcccgtgcaatcccggcccgaacggtattggaagccgccgagtccctgcctgttccaccggacagcggacgtgaagatgactggtcgatgatcgtcaattgggtgccatgcgtggacggcctgttccttcccgatcaggaggagcgcatcgtcgagggctgcaaggccaacaacgtcgacatgctggtcggcaacacgaccaatgagttcatcgcttcgactgaagatgggaagcctgtgcatgtcggccagctcggcaatctcacgctgatccgcaaatggaccgcaagcggtggaaccgcgccatactactatcatttcgatgtcgctatgccgggggatgatgccggagccttccactcatccgatctgtggttctcctttggaagccttgcgaaatgctggcgtccgttcgttggatggcattacgatctggcaaggcgaatggggctgtactggaccaattttgccgccaatggcgatcccaacggaacggaccgtgacggaacgccgcttcctgtatgggatccttgcatcggtgaggaatgccccgccatgcatttatgccaagaaccgggcatgcggacggattggcttaccgaaacggatcgaaaagcattcggcctgtgacggcatgccgttgatgtataaatactgatatgtaaacagggacggtctttgtggaccgtccctgccgcataatggtttgccgttgcgcgtgcaggaggatttcgagactcattatccgacttttcaccgtttccgtaggctggttcgtcggtggcgtctcgcggaggctcagagcatcaaagaccctgttcggcgtcgtgcggcttattgtgaggctaggagttatttgaagtgtcctaggccggatatttcgccgtataggggcgtttctgcgtggattccgtcggatgtggcgtctcaatcgttggacgtggcggtgagcgtgaacgggggtgattatgaggaagactgaactccccccgctcatgattagcgcggacactatggcgtatttgcagtgcagtcgtcagcatgtcttgttgggtactcaactcgggtaccttgctgggtgccggaaatgttgacattggcgtacatttccgtacattctctgtttgtgccgtatgtcttgaaatcgttggtattccgccgttttggcatgaaaaaagggcttccggatttctccgaaaaccctcaaggcggagtcagagggattcgaaccctcgagccgctaaaaacgactaacaccttagcagggtgcccctatcggccactcaggcatgactccactgttttaccgttttcacggcgcaacagcatgcaactataccatccatttgcgggcaaaacaccatatctcgcaaaaaagatgagaaaacgttgaaatttcaacgaaaatacgtgttgtgggattgtgctgccatgctggtttcgggtttgccgacacgccgttgcgttaaggtgcggcactatattcgaacatttgtttcaatatcttgcgaaaaacggttatcatggaaccatgagcaccgcaccgagaatcgcagcagccaaacgtgactggggtcacgacgaggctggctgcacggtgctgcacatcgacatggacgccttctacgcatctttggaggtggcgaggcatccggaatatcgcggcaagccggtgattatcggcgtgggcaaccgttcggtggtgtccgcagccagctacgaggctcgccaatacggcgttaattcggccatggcgagttccagggcgcaaaagctctgcccgaacggcattttccttccggtcgacatgcgctactatcgcgcgatgtcgcatcgcattttcgaggaagtgttcagtcggatcaccgatcgtatcgaacaggtatcggtcgatgaatgctatatggacgtttccggggcgctgttgcggtgggggagtcctcgcgccattggggcgtggattcgcgaacaggtggtttcgcgttacaacgtcacctgttccgtaggcatcgcggcaaacaagctggtcgccaaaatggcatccaccaatgccaagcccaacggcatgcttatgattcctgtggcgcggcatgcgcaattcgtgcagatgatgccattgcgtggcattcccggcattgggccttctttggagaaacgactgaatgcgtggggcgtcaactccgttgccgatcttgcgcgtatgagtcttgaatcgttggaacaggctactggatcggctatttccgcgcgtgggctgtatcaggcggcccgaggactggatggtagacccgtcgtgccgtatacgcaggaaaaatcgattggcgcggaacgcaccttcgatgcggatacgcaagacatgcggcaggtgtgctccatgctccgctggtgttgcgatgacgtggccacgtctttgcgcaggaggggtttcctcgctcgtaaagtcatggtcaaacttcggtttccggatttgagctacgcaacaaaagggcacacactgggctgtcctacggatgcggcgagcgtgctctacccgcaatgtgccaatctgctgctctccatgatgggcatggctccggagtctgcgcatgccatttcccttacacgccccgtgcgtttggcgggaatgagcgccagtgggcttgtacttgccgaagaagctgtgattcagccttcgctggatgatctgctcgaagaaaacgaagtcgaacagcgtgctgaaatctccggcggcagcgcccagtcgcagacgcattcggcgcgtttgcgtggcgcggaggcggcgcttgatgcggtgcgtcgaaaatacggtaacaatatcgccagcttcggggtgtagaagcaagggcatatccgttattcttgaagtgatgagttgagaaggcccagaggaaggcaggggcgccatgaaatacaggaaagaggcggtgcacgcgaccaatccggaagtgcttgcggccggccgtcgcaaacttgtgtttgcggcattggcggtgcttgccgtcgtgcttgtggcgggaacttggctgttggtgcatagtcttcaaccgaagcagaacgatgctgccgtgaagccggagacggcggtaagccagccgaaaacggttgaaaagaagcaagcgactgagtctgcggagcatcatggcaattctccggattgccccgacaccgactgcatcgccatgcttgtcaacggtgatctgctgttccacgaggggctttggaaccagtacgccagcaccaacaccgcggccacggatggcacggcattcgactttaccggcttgttcgagccgatgcgcaaatacattgatgcatccgacattgccgtatgcgaattcgaaacacctatcgcgcagcgaggcggtccatatacgggctatccggtattcaatattccggcagaagtggccgacgccgcgaaaaacgtggggtatcgcgcctgcacgcatgcgtcgaatcattcctgggaccaaggtgctgacggcatcgcgcgcttgtgggacacacttgatcaggatggcatcgcccagaccggctcctataaaaccgaagaggattcgtataagccgttggtcatcgattcgcctaccggtggcggtaagcttggtctgattgcgggaaccgtgtcgttgaacgcgcagacgcctgactacgactggcgtgtggatcgtctgcgtgaatccggagacccgaaccaccaagccgatatcgacaaggcggtagccaaagcgaaggccgctcgcgagcagggtgccgatgtggtggccatagccatgcattccgtgcaggagtatttggattacgctgattcctggcagcaaagtgaggctcatgaactggccgataccggtgcgttcgacgtgatttatggcgctggatgccattgcgcgcagccggtcgagaattacaacggcacttggatcatctacggtttgggcaatgccgtgaccgaatcggccaatactgcggacacgttggtgaacaatcaaggcattaccgcgcgtattcaattcgcgggcaagaaaggcgtggccggttcgtggcgtgtcaaccgcattgactgggtgcccagtgccaacgaaacccaaggcaaataccaatggtgttcccttgcaagcgatcatcctgacggcacctgctgggatgaaacgcaagacgccaatgtgcgccaacgcatctgggacgtgctctattccatgggcgccgatcagaacgtggtcaaggaatggaatattaccgcggagcaaacgagttcatctggccggtagctttccgtggcacaatatgcctcataccgtgagtcgcatatgcgtaagaactctcgaacatacaatgtgaggtgaaaacatggaaatctacgaaacccaaccggaacgcaccgatctgccactggtggtcatgcccgtcatcatcgaatcgatgatcgaaccgttcgaaaagaacttcgaactgctcaaagacattgcccgcgtgcgcatgtacaaggatttcacgcttgacgaagacaccatcgtcgaacgttgcgccgaagctgacgccatcatggtgatcggattccactgcgccgattccatcctcgatcggttgaacgccaaatgctatgcattcggcggcaccggcgtggccagttacatcgatctcgacaaagccaaggaacgtggaatccgcgtatgcaatgtggtgcactatggcgaccatgccgtggccgaacacaccatcgcactgcttatggaactcgccagacaggtcggcaaactcgacaggcaagtcaaaacaggcgattgggacggtgccgacggctacgagctgtacggcaagaagcttggcatcatcggccttggcggcatcggtcagaccgtggcgcgcatcgccggagctttgggcatgaacgtgtccgcatggaactcccatgtgccggagcaggtgttcgccgatctgaatatcactccagtcaacgatatgaacgagctgattgccggttccgacgtggtatccatccatatgccgctgctggactccacaaaaggcatcgtcactgcggaaaacctcgaagctctgaaaccgggaaccatgtttatcaacacggcccgtgcggaaatcatcgaaccgggcgcattgctcgccagactccagcgaggcgacattcctgcggcgctcgatgtgttcgaacacgagccgctcactgccgacgatccgctctgttcgattccaggcatcatcctcaccccgcacaccgcgtggcgcaccgatggcgcctatgtgggcatcaccagacaggtggtccaatccgttgcggcattctgcaagggcgaggatttcaacgtcgtcgtgtgaataaccgcaaaaccggtatgggcaaaacatgtggacggtcggcgtgattgggtaggttgaaagacatgcagaccatactcgattccgccgatcagcccgcgcatgatgcgttcgtcgagaaaaaatcggaattcatcggcgacgcctgtcatatcgactccttggatgaggcgctcgcgtttgtgcagacgattcgcgaccagcatccgaaagcgcgtcatgtcgcctatgctgcggtgtgcggcggttccgacggtcgtttggccgaacgcatgagcgatgacggcgagccatcgggcacggcgggcaaaccgattcttgacgtgttgcgcgccaacgaggtgacggattgtgtggttgccgtcacccgatatttcggaggtattctgctgggttccggaggcctgatccgcgcatattccacgggtgcgtccattgcggtcaaagcggcgaacaaagcgaagatcgtgccatgttgcgaatatcaggtgacgcttgactatccgcaattgggaagctttcagaatctgcttgcgtcagtggacggcgagcaggcggatgcgcaatataccgatcgcatcgtgctgtcaattatcgttccgcaggaacaatcgcagaaattcaaatcacgaattatcgaaacgttcaatgcgaccgtcacgccgcggcaaacgggcacgtccaatcgcccggtgcgatactgaaattcaacgatgacgaatggaatattgagcagaacataacgtaaggtggaacgcatgaccgaagatatgagctcgcaagacactactgccgtggaaactgccgaaaataccgtcgaaaccgttgtgggaaacgccgacgaacaagcatcaaaccaagacgttccttcggatttcgagcctttgaccgcaacctacgagcggttgcgtcactccacggatgccgccgaattgagcgaattcgcgcgccgtccgctgcctgaccgttccgaacaggccgctttctcgcgtgccacggcattgctggaagccgtcgccggcaatgcgcatacaccgttggaagatcgcgtttttcttgcggaaaccatgccgtttccgaatattctcgtcaaactgtccaccgacgaatccgttgaggtgcgtaaagctgttgcgggcaatgccaatgataagaattggctggtggggcgtctcaccaaggatgagtccctcgaagtgcgcgatgtcgcgttgcgcaacaagcagacgtcttggaagatgcggctcgaaggcgcgcaggatccgggtatggattccacggcccttgattttctgggatctttgggggtcgacgtcgagccgaatgctcctgccgtgcttgcttccatggtacgtagggccgttgctttgaacccgaacacgtctgatcagatgttggaaaaacttgcgcaggatgcgtcaggagaggtgaaaagggccgctgaacggcatctttcggaaaaataattgcatacgttgtcatttttatgagatttttgcgcgtggtgcatgtgattggggcatagactgttgtttatgacagaacagaccgaaaatgcaacgcgtctagcccgtccgatcattcgcctggcaaagttggtgggtatcgccaccagttacgtcggcatgagccgcgactaccacgaaatcgaagacgatgttctcgtggcggtgctcaaggcgctcggaatcgacgcttccaacgatggggcgatcgagcagtccatcaccaccattcagcgcgaacgcgacacacgtatcgttcctccgaccgtgctgcacgttgtcggcaaggaaagcaaggttgaggttcacggcggagcgcttgacgttcctgaagcttccatcatgctggaagacggtggggcgtatgccggcaaaatcgagctcgagggtggcagcgataccgtggtcgaggtcgacggcggcttcgtgtgcacctcatatctggtgcttccggcagatcttcccgaggggtatcacacccttgaagtcaccgttggtggcaagacggagattgcaaccgttatcagcgctccggaaaagatcgagctgcttgacgacatgaaggaaggctccctgtggggctggatgagccagctctactccattcgttccagcggttcctggggtatcggcgactatgaggatctgaagaccctgctcgtcgagtccaagaagaagaccggcgccgacttcatgctgatcaatccgctgcatgccgccgaaccggtgccgccgatcgagccatcgccgtatctgccgatttcgcgccgtttcattaatttcagctatattcgaccggaatccatgccggaatatgccgtgctttcgccggaagacaaggcgaaagtggatgaactgcatgagcaggtcaagccgctcaacggcaatgcgcggatcttggatcgcgaaaccatgtggcgtaccaagatgcaggcgttgtggatcatctacaagtccggcctttccgcacagcgtcaagccgagttcgaccagtatctcgccgaagtgggcgatgagatcgaatcctatgccacatggtgcctgtgctacgacaagtggggcgcctcgaatggcagcgacgacgattgggtgcgcaagtacaatcgtgattccgaggaagtcgcgcagcttcgcgcacagtacccggacacgcttgaattctatcgttggctcgaatgggtcgccaccgagcagctgcatgcggcccagcaggcggcgcgcgaggccggcatgaagatcggcatcgtcgccgacatggctgtgggcgtgcatccggccggttccgacgtgtggtggaacccggagcgttttgccaagggcgccacggtcggcgctccgccggacatgttcaaccagcagggtcaggattggagtcagccgccgctgaatccaatcgctctcgaacagaccggctacaaggtgtaccgagatatggtgcacggcatgttctccaatgcgggcgcggtacgtattgaccatattctcggcttgttccgcttgtggtggattccggaaggcaagaaagccatggacggcacctacgtgcattacgattctgacatcatgctcggcattctcgcattggaagcatcccgcgccggtggtgtggtcgtgggcgaggatctcggcgtggttccggcatacgtgtccaagtcgctgtccgagcacggcattctcggttgcgctgtggaatggttcgagcagttcgacggcgaattccgtgcgccgaaggattggcgtccgtatgcgttggcatccgtcaacacgcacgatttgcctccggcagccggctacttggagtacgggcatgtcaaattgcgtgaacagcttggactgctgtccggtccggtcgaagaattccagaagtccgcggaagccgaacataacgccatgctgagcatgcttgtcgacgaaggctatctcgacgcttccgcgctggaagacgagcttgccaacgaaaacgagatcatcgacgcgctgtaccgcggtttgaagggatcgccatgcaagctcatggcggcgtccatcgtcgacgcggtcggcgaaaagcgcacgcagaaccagccgggcaccagcaacgaatatccgaactggcgtattccgctggctgacggcgatggcaatgtcgtgccgctggagcagttgttcgacaatactcgactgcaggagatcgcagcgattatgcgcggctgagcttgcagcggattgaggctgattgcagctgatttcgattggcggaaggccggcgatgcaaggtagggagacctgccaagcgtcgccggcttttgcgtgtcgattgctgtgtttccgtattcgcaagtactaggggttgatgtgtcgcgaatgtcaaggctggcgatatactagtagattgttgtgtttccctacggggtccttcaaagcgcttttcccactcgccatcgaggactttcagggagcccacggataatgagacctgaaaaaggcatcattccgcgcctaaccaacgcagagatgttgatggaaggtccggaacacaatatatagaaaaggtacatcgtgaaaactttcactccgaagccagctgatctgactcacgactggtacgtcatcgacgccaccgacgtggtgctcggccgtctcgcttcccaggcagccatcctgctgcgtggcaagaacaagccgacctacgctccgcacgccgattccggcaaccacgtgatcattctcaacgccgataagatcgctctgaccggcaataagttgggcaaggaactgtacatgcactccggtcgtccgggtggcctgcgtcgcgatagctacggcaagctgctcaagaccaaccctgagcgcatcatcaagtccgctatcaagggcatgctgccgaagaatcgtctggccaaggtccagctggatcgcctccacatcatctgtggcaccgagcatccgtacgctggccagaagccgcaggttttcgagatcgctcaggtctcgcagcaggctaagtgaaccgaagggagataagaaacatggctgaaaacaccaacaactccgcggttctcgagaccgaagaggagctcacctcgtacaccaccgagaccaacgctggcgctggcaccggtacttccgctatcgctccgggctatggcaccggtcgtcgtaaggaagccgtcgctcgtgtccgcctggttccgggcaccggcaagtggaccatcaatggtcgcaccctggaagagtacttcccggccaagctgctgcagcgtgaggtcaactccccgatcgtgcttctcaagctcgaaggcaagttcgacgctatcgtcctcgttgacggtggcggcaccaccggccaggctggcgcaatccgcctgggcgttgcccgcgctctgaacgctatcgatcgtgatgcgaaccgcgcagccctgaagaaggctggcttcctgacccgcgacgctcgcgtcgtggaacgcaagaaggccggtctgcacaaggctcgtcgcgctccgcagttctcgaagcgctaaagctttacggcttatacgaaacccctcggaaattcgacttccgaggggtttcttggtattccagacggtattttgactggcgtttagatggttggcatctgcttcatcgcgctgatgctcaatgccggaagcgtccacaatgtcggatcatcttccgacagcccatcatcggcggattgcagattgtccgtatcgtctttcatttgccagtacatcatgttgatgcggtgcagatggttgcggagcctgcccgcgggcttgctttccgattcttcgtcgaattccgacacccgttcgatggacgttcccaatcccggatattcgccgacaatctccgatgaggaccagaccatctcccattcgatgtctttcggcagatgaaaacgcgtgacctcatcggaaccgttgatcagaatcagcagacttggctcgtcgggggatagcaactgcatggcgaacgaacggacggaaggattcgtccaatccgcatcatttggcatctgtccattcggcaaataccaatgcacgcgatcggatttcttcagcaaaccgatttcgctcaggcgagtgaagaaatcctcatgattgtacaaatcgcgggatttacgcaatgtgattaaacgggaagtgagattgaactgcttcaattccggcgtttgttcggtactgtacagccaatcccaatcaagccaggtggtgtcgttatcctgcgtgtaggcgttgttgttgccgttctgcgaattgccgaattcgtcgccggcaagcagcattggcgtgcctagcgaaagcagcagcgtacccagcaggttcatggtggcgcgttgccgttgctgcacgatgatttgatcgccgctggggccctcgtgaccgaagttgacggaatgattgtcgtttgttccgtcgcggttgttttcgccgttggcctcgttatgcttggttttgtacatggtcagatcggctgtggtgaagccgtcatggcatgccacgtaattcacggacgcggtcgaaccgcggcctggatcggtggcgaacaggtcggatgatccgcacaaacgtgtggccatctcctgcatggtcatttcgccgtattctccaccgcgcatgcgatccacgtcggtcagccagaatttgcgtgtgcaatcgcggaacctgtcgttccattcggcgaaggggatgccgaattcgccggtgcgccagccatttggaccgcaatcccaaggttccatgatcattttgagattgccgagcagcatgtcggaacgtaatgcatacaggaacggatggtagcgggtgaattcaccgtcgagacgtgccagcgtcgccgcgagatcgaatcggaatccgtcgatgccaatgcgtttggcccaatagcgcaacgaatccacggcgaatgtggtgacgtgcgtgttggtgaaatcaagcgtgttgccgcagccggtggtgtcgtacaggcggctgatcttatctttggtgcgtcgataatatgccagattgtcgagtccgcgccagcatacggtcggtccttccggaccggattcgcaggtgtggttgtagaccacgtccataatcacttcgaatccggcctcatgcaaggctcgtaccatgtcgatgacttcctggcgtactgcggccgcaccggcctcctgggagcgcttggtggcgtatgaggcttccggcgcgaaatagccgagcgtcgaatatccccaatagttgacgcgtccgcgttcctgcagaaacagttcggattgcttggcttgaatcggcagcagctcaatggaagtgacgcccaaatcctgcaggtaggagagcgtcgccggatgtgccaaacctgcataggtgccgcgaagctctttgggaagccaaggcgcgttggctgtgaagcctttgacatgcagctcgtagatcacggttttgctccatgccacatgcgggtgtgatggctcaccgtcatgcttgttggtggcacgatcgtctatcgccacggaaacgggaacatgccccacggagtcgatggtgctcatcgggccgaatggcgaacctttgactttgccgttcacgatctcgcattcataggagaacgctccgggatcaagctccattgatccttcgatgcctttggcataggggtcgagcaacagtttgtacgggttgaagctcacgccgtggtcggggtcccatgggccgttgacgcggtatccgtattgcatgccgtcccatgcttgcggcacgtgcacgtaccacagtccgtaattgggcccgtccatgcggaatagtgtttcgcgaagattgagcgaggggattcgccgagtgcagatgcgctgtttcatcgcctgatcgatgaaggtcagccccggctcgttgaacaatcgtactgcgtcggcatagaaggcactgggttggtcgagcggctcaagtacgcaaaaccacacttggtccgctgtttccgagcggacgatggcatccgccccaccatcatcggtgaagtagagacctggacgagttgcataacggtgcaaagacgggttcttcataacctcattctaaacactttgaaattatctgttgacttactatgtcgaggctgtcgacgctcgtgccggtctgatccggccgtgagcttgaactcgagcaggtgcaggacttcctcgacggcaaaatcgccgccgcttccaaggctgtcgtcaaaatcggtgctgacgctgtttattcgtcctgaacagcctggaattagcaaaaaagtgtcacgatatgacggcaaatgcgccgctgacatcgccgcatagcgcatatcctaatcacaaaagggaaaaacgtatcgtaccaaccatcacaaggagggtattatgaccaaaccaatgtctgaattcaccaccgatctgcagcattccggcatgccggcgaaagatctggacgaaaccatcgaattctataccaagaaactcggtttcgagttggcgggactgttccataacggtgaaaaccgttgcgcattcctgcgttacggccatctgaccatcgaaacctgggaaggcgacccagcgccgctgaccaccggtgccatcaaccactgggcgttcgatactcccgacattgaagccgcgttcgaaaacgcgaaggaactcggactgaatttcaaagacaccgaaattcagcatatcgacagcttctgggagcacggcattcgctacttcaatgtatacggaccgaacggcgaaaccatcgaattctgccagattgtcaaataactatcattagatgattaccgtcaaataatcgctgaaaaaatacaacaagtgaagcagacggaagcgaacaaagaagcgtgcgttgaaccttatatacgggttcggcaacacgcttcttttgttatgcaatcgatgcgactaatgcgattaatatgtgcgcaaaagcggtcacatatcgcatagttcgcgtacgtacggctccacaaaacgcagagccgcgccgataatgtcttgatggtcgagcgccattcccttgcgcagggtgaaatccgtggtgccgaatggcgtatgttccaccacgcgttcgcgtagtccggccatatcgtcatcatcgagatattgtgctgcctcaccgctgatgatcacgtcaccggccagtaccgagcgaatgttcgttaccgccagcgccacataatccagccattgcgagaatcgttcgcgatgctcctgctcgccttgttccaacaccgagaagaagccgggcaggctttcgccgtcttccatcagcgtttccggcgagcaatacgtatccatgcagccctgttgtccgcagtagcaggtgttgcctcctggaatcagcgtcatatgttcgattgagccattgcattggttgggcccttggtagagcgatccgtctacgatgaccgcgcctctggggcgtcgctcgaggtagatgcagacggcatccttcagattgtggtcgaaccagagttccgccatggcagaagcgtcggaatcgtgaatcatcagcgacggatagttgaggccgtggctgagttcgttgagtttcaggccggtgttgttcatgattttgccgaaggtgatcgactgcccgtctgccgatacgatgccttgcatgcagaaggccacgcctcgcaccgtgctgccttgtttcgccagttcctgcgcgaaatcgttgatgatgccgttcatgcgctggtagtaggcgtcgttgttacgataggggagtgtgcgctgtctggtggccacggatttgccgttcagatcaatggcgatggccgtgattcgtgtggtttggattcgcacgccgatagccacgctggagtgtgccgcgaattcgtagatttgcgctttgcgtccaccggtggattgctgcatctcgcctttgacgatgagcccgtcggcctccatggcgcgcagattctgcgtgatggttggcaggctgagccctaattcgtgttcgaacatctgcttggtggctgaaccttgagtgtagatgaacgcggtcatggccttgagattggcttctttgactgatagggcggattgggctttcactggttgatccttcctgcgcaacttcttttccaagattacttcataaaagtcctttccttatgtctcgtgttggtctgagatatcaggtattgcaaaaaagtatcaaaaacagctgtgcataaaggattttctgccacttttctgcgtcgaaaatatatttatcaacaaaaaagttgagacggtgacaacgacgttctaccaagaaaagagacatgttatgaagataggtctgccgcgcacgctattggccggcttggtcgccatagcggtgttcatgaccggcgatggctttgaattgacttttttgtccaaatacatcgtggaccagggattcagctcttcgcaatcgtctctgatgttcaccatgtacgggctggtggctgcgcttgccggctgggcgtccggtgtgctagctgaaatgttcggtgccaaacgcatcatgcttatcggcgcgagcgcctgggtcgttttgcatctgctgttcgttggtgtggcgctgccgagcggcgtctatccgctgatgttaggcgtgtatgcgttgcggggtgttggttacccgctgttcatctactcgttcgtggtgttgatggcgcaaaccatcgatcctgccaagctcgcgtcggccatggggtggttttgggccgcctactcgttcggcatcggcgtgtttggcgcatatttgccgagtttcaccattccgatggtgggcgagtactattcgctgtggctttcgttgccgttttctatagctggactgctgatttgcctgctgatggtgccgaaaagcaagggttctggcacctcttccatgagcaatgcagacaagctgcgcgagcttagtcgaggagtcaccattctggtgcataatcgccaaatcgctttggctgcggtggtgcgtgtgatctgcaatctgacgttgtatggctttcccgtcatcatgccactctacttggccactaccaacaatggcggcggcgcttggtttaaggtttcgcaatggagtcagatttggggattccagtttgtggtcaccattttcggcaatgtgttctggggtcgtatgggcgattcgcatggttggatgcggcaaatgcgctggtttggctgctggttctgtgtgatcggcacgctgggcatgtattacattccgcagtttttcggggcgaatatggtgcttatgtgtgctgatgcggttgttcttggattgggaatttccgctttcgttcctatgggagccgtgtttcccgcgttggcgtcggaacataagggtgctgcgatttccgcgcataatctcgcttccggcctgactacgtttttcggtccgctgattgcgacggtgctgatttccactatcggattcggcggcgtgtgctggacgtatgcgatctgctatgcgatcggatcgttggccacgctcggcattcatcctcatcaacccggatttgacgatcgtggccatcgcattaccgcgatcgaacgtaactaatcgcaattgaatatcaattgctcaatcatcatttttctcaaaaaacaccattatccacaaaggagaataatcatgaaggcagtcgttctcgaagagcagggcgtcatcaatgtacgtgaggtgccggacgcccccgcacctggtctaggcgagctgaagatcgcgccacataccgttggtgtgtgcggttccgatctgcactattacacgcatggtcgcgtgggtaaatatgtggtgaggcagccgatgattctcggtcatgaggcttccggcacggtggttgaggtcggtcctggcgtcgaaggcttcaaggtgggcgatcgtgtggccatggagcccggcattccggatatgagttcgcgtgccagcaaactgggcatgtataacgtcgatcctgcggtgcgtttctttgccactccgccgattgatggctgcctgtgcgaaacggtgaaccatcctgcggcgttcacctacaagctgcccgacaatgtgagcttcggtgagggtgcgctgcttgaaccgttggctgtgggcatgtggtccgccaccaaggctcgtatcaagccgggcgatgtctgcgtggtcaccggatcaggcacggtcggcatgctgaccgcgtcgtgcgcgttggcgggtggcgcttccaaggtgctgatctccgatgtgtcggcaatcaaactggcgattgcggctcagattccaggtattattccggtggatctcaccaaggaggatctggtggagcgcgtccgcgaggaaacggggggctggggtgctgatgtggctttcgagtgctcgggctcgccgaagtcatacgagacattctggaagctgattgctcccggtggcgctgccgttatcgttggcattccggtcaatccggtggccatcgacattacggagctgcaggctaccgaggtgcgcatcgaaaatatcttccgttatgccaatgtgtatcagaaggccattgacctcgtggctaacggtaaactgaatctgaagccattcatcaccgacacctatgcgatggaggatgcccaggcggcgttcgatcgcatggccgaggggcgtcctggagacattaagctgcagattaccgtgaaaaacgactgacgttacgcacgttacggaacgacgaaaggggtctgtgtcatgggtgctgttgcacaagtcaacgataatcggcatgggaaggcggctttggctcagacctcttttggtggattcgtgccgaaaggtggaagtccgaacgattccggcgtattggagatcattgtgccggacgcgcaggcttcggtgcgttgggcgaagcatggctacccaagctcgttggcgaaatggcatcatcatcctcatattgaaattcatctaattcgggaaggcaccggattgatgatggcgggcaatgccgttgttccgtatgaggccgggcaggttgcgctgattggttcaaatcttccgcataattgggtgtccgacatcgctccgggggagcggcttcgtcagcgtgatgtggtgtgccatgtgcgtccggaaaccatgcgtctgctgatgtctggatttccggaaacgtctggttttgcaatggtgttgaaacgtgcggggcaggcattggtgctgagcggtgaatccgctcgtcaggccggttcgattctggaaaacatggaggaacatagtcttgcttgccgtgttagtgatctgattcgtgtgttggatgtgttcgcgcatgcccccgcagatgaatcctatacggtggttgcgtccggatacgatccggctgtatgcagtggtgcggaacgtgtggtcaatgatgccatcgagtacatttcatcgcatctgagcggtgaaattagcatggatttggccgcccgccaggccggaatgagcgtttcggctttctctcgtctgttcaaaagggctgcaggaatagggttttcggattttgttcgacgattgcgtatcgggcatgcatgcagattgctgacgaccacgaatcaaagcgtcgcttcgattcgtcgcgcttgcggatatggtaacgcttcgaatttcaatcgtcgcttctttgaagaaacaggcgaaactcctactggctggcggaaaaaatacattggacgaacaagataaataaatcgactttgtaaaagctcgatatgattgatatcatatagaaaatacttttataaaagatatggaggtgagacttgagaaagtgtgtgtgatttatgataaaaagcaacaaaaacgctcaaaatgatgtttttgaggctttttgattccataaaagaacgcaatctaaacattaaatgaacagaagataacatttctcttgcgacacgacacagtggaacatcatattgcatactcactaaagtgtgtcctaggtcacaaaagaccagcaacgcgtccatccgcttcgaggcggatggaataacgggaaactactttgcaaacccccaaagaatcgaggaggacttcaagtggcagacgcaaagaaggaagagccgaccaagccgactccggaagagaagctcgccgcagctgaggctgaggtcgacgctctggtcaagaagggcctgaaggctcttgacgatttcgaaaagctcgatcagaagcaggttgaccgtatcgtcgccaaggcttccgtcgcagcactgaacaagcatctggtgctcgccaagatggccgttgaggaaaccggccgtggtttggtggaagacaaggccaccaagaacatcttcgcctgcgagcacgtcaccaactatctggccggtcagaagaccgtcggcatcattcgtgaagacgatgtcatgggcatcgacgagatcgccgaaccggtcggtgtcgtcgccggcgtgaccccggtcaccaacccaacctccaccgccatcttcaagtcgctgatcgcgctgaagacccgctgcccgatcatcttcggcttccacccgggcgcacagaagtgctccgtcgaagccgccaagatcgtgcgcgacgcagccatcgcggcaggcgctcctgagaactgtatccagtggatcgagcacccgtccatcgaagccaccggcgccctgatgaagcatgatggtatcgccaccatcctcgccaccggtggcccgggcatggtcaaggcggcatattcctccggcaagccggccctcggcgtcggcgctggcaacgctccggcatatgtcgacaagaacgtcgacatcgtgcgcgccgccaacgatctggtgctctccaagcacttcgattacggcatgatctgcgccaccgagcaggccatcatcgccgacaaggaagtctacgctccgctgatcaaggaactcaagcgccgcaaggcctacttcgtgaacgacgaagagaaggccaagctcgagcagtacatgttcggctgcaccgcatattccggccagaccccgaagctcaactctgtggtgccgggcaagtccccgcagtacatcgccaaggccgcaggttttgagattccggaagacgccaccattcttgccgccgagtgcaaggaagtcggcgagaacgagccgttgaccatggagaagctcgctccggtccaggccgtactgaagtccgacaacaaggaacaggccttcgaaatgtgcgaagccatgctcaagcatggtgcaggccacaccgcagccatccacaccaacgatcaggctctggtccgtgaatacggccagcgcatgcacgcatgccgcatcatctggaactctccgagctccctcggcggcgtgggcgacatctacaacgccatcgcaccgtcgctgaccctcggctgcggctcctacggcggcaactccgtgtctggcaacgttcaggcagttaaccttctcaacatcaagcgcatcgctcggaggaacaacaacatgcagtggttcaagattccggccaagacttacttcgagccgaacgccatcaagtacctgcgcgacatgtacggcatcgagagggccgtcatcgtgtgcgataaggtcatggagcagctcggtgtggtcgacaagatcatcgaccagctccgcgcacgttccaaccgtgtgaccttccgcatcatcgactacgtcgagccggagccgagcgtcgaaaccgtcgagcgcggtgccaccatgatgcgtgaggagttcgagccggacaccatcatcgccgtcggcggtggttccccgatggacgcctccaagatcatgtggctgctgtacgagcacccggaaatctccttctccgacgtgcgtgagaagttcttcgatatccgtaagcgcgccttcaagatcccgccgctgggcaagaaggccaagctcgtgtgcatcccgacctcttccggcaccggttccgaagtcacgccgttcgctgtgatcaccgatcacaagaccggctacaagtacccgatcaccgattacgcgctgaccccgtccgtcgccatcgtcgatccggtgctggcgcgtacccagccgcgcaagctcgcatccgatgctggcttcgacgccctgacccactccttcgaggcttacgtctccgtctatgccaacgatttcaccgatggcatggcgttgcacgcggccaagttgatttgggacaacctcgccgagtccgtcaacggcgagccgggtgaagacaagatcaaggcccaggagaagatgcacaacgccgccaccatggccggcatggcattcggctccgcattcctcggcatgtgccacggcatggcccacaccatcggtgctctgtgccacgttgcccatggtcgtaccaactccatcctgctgccgtacgtcatccgctacaacggctccattccggaggaaccgaccagctggccgaagtacaacaagtacatcgctccggaacgttaccaggagatcgccaagaaccttggcgtgaacccgggcaagactccggaagagggcgttgagaacctggccaaggccgtcgaggactaccgtgacaacaagctcggcatgaacaagagcttccaggagtgcggtgtggacgaggactacttctggtccatcctcgatcagatcggcatgcgtgcctatgaggatcagtgcgctccggcaaatccgcgtatcccgcagatcgaggatatgaaggacatcgccatcgccgcatactacggcgtcagccaggccgaaggacacaagctgcgcgtccagcgtcagggcgaggccgccacggaagaagcttccgagcgtgcatgagtcgattcatgtataggccatcagcagtgacctacatataaggtgcttgcgttatatcggcaagcatcatagataacgaggaatttggttggattcgttcaaccagattcctcgttttttatatgtggaaaagcattttcggatgatgctgcattctgatcgcaacagacgatcggcaatgtgcatctcattcgttttcagggacttgaaaacaggacttgagaccgcgacacgcgaggatttcttaagactacccctgatgcttaaataaagaagttgcctgattttagggctcgcaaattggaattaaaaaagcgagcgtggcacagtgatcacgagagtgaaaactgcatggctgcgcactgatgtggtatgaccacggaacttccacggtttcgggggtcttctgcgccggtgccctttgagaagcaggctggtaaacagtaactaacgaatcgctagaaagggcggaaggcaatggcgggacagaaaatccgcatcaggcttaagtcctatgaccatgaggtcatcgaccaatcggcgaagaagatcgtcgaaacggtgacgaacgcgggcgcaactgtggttggcccggttccgctcccgaccgagaagaacgtgttcgtcgttatccgttctcctcacaagtacaaggattctcgcgagcatttcgagatgcgtactcataagcgtctcatcgacattgtggacccgaccccgaaggccgtggattcccttatgcacattgatctgcccgcagatgtgaacatcgagatcaagctgtaagggaggagggaaccattatgtctaatcgcaccgcactgctgggcaagaagctcggcatgtctcaggtctgggacgagaacggtttcttcgttcctgtgaccctcgttgacgtctccaccaacgtggtgactgctgtcaagtccgaagagtccgacggctacaaggctgttcagcttggctacggccaggttgacccgaccaaggtgactaagccgcttgccggccacttcgccaaggctggcgtcaccccgcgtcgtcacctcgctgaggtccgcaccgataacgccgaagagttcgagccgggtcaggagctgaccgctgagctgttcccggagggcaccctggtcgatgtgaccggtaccaccaagggcaagggcttcgcaggcaccatcaagcgctggggcttcaagtcctatcgtcgtacccacggctctcacaagaacgagcgtcgtcctggctctgttggcgcatgcgctaccccgagccgtatcctcaagggcaagcgtatggctggccgcatgggtcatgtaaccaacaccacgctgaacctcaccatcgtttcgtcggatgttgagaacggcgtgctcgccatcaagggcgccatcccgggcccgaagggcagcatcgttctcgtccgttcggcagtgaagggagcctgataaatcatggcaaacgttactctgaacgttaccgataaccagggcaatgcaaccggaaccgttgaggctccggctgagatcttcggcttctccgccgaagaagtccagtcccgtatcccgctgatccaccaggttgtggtggcccagcgcgccgctgctcgtcagggcactcatgccaccaagactcgcggcatggtttccggcggtggccgcaagccgtggaagcagaagggcaccggtcgtgctcgtcagggctccatccgcgcaccgcagtggtaccacggcggcaccgtgttcggtccgcagccgcgcgactactcccagcgcaccccgaagaagatgaaggccgctgctctcaagtacgtgctttccgatcgcgccaatgcgggtcacgtggcagtcgtggacttcggtgtctccgaagccccgtccaccaaggccgctgttgccgctcttaccccggtgaccgagaacaagttcaccaccgtggtgctctctcgcgagaatgtgaacgaatggctttccgttcgtaacatcccgaccgttcacccgatcttcgccgatcagctcaacacgtacgatgtggtcaccgctcagtacgtggtcttctccaaggaaggcttcgacgctttccttgccgcgaaggctgagccggctgcaaaggaggcctgattttcatggtcgctattcacaagcccgcacacgacatcatcctcaagcctgtcgtttctgagaagagctacgctctgtccgatcgcggtcagtacaccttcgtggtggccccgaacgcgaacaaggtccagatcaagcaggcaatcgaagagatcttcaatgtcaaggtgacgaacgtcaacaccctcaaccgcgccggcaagcgccagcgcacccgcaacggtttcggccagcgcgtcaatcagaagcgcgctatcgtgaccgtcgccgagggccagacgatcgacatcttcggtaactgaaggctagccgagaaaagttaaaggaagaactagattatggctatccgcgtttataagccgacgactgcaggccgccgtaacgcgtccgtctcggacttctccgagctcacgcgttccacgcctgagaagtcgctggttcgcaagctcagcaagactggcggtcgtaactcctacggccgtatgacctcccgccatcgtggcggcggtcacaagcgccagtaccgtctcatcgacttcaagcgttgggacaaggacggcgtgccggcaacggtcgctcacatcgagtacgacccgaaccgttccgcccgcatcgcactgctgcactacgcagacggtgagaagcgctacatcatcgctccggaaggcatcaagcagggtgacgtcatcgagaccggcgcccaggctgatatcaagccgggcaacaacctgccgctgcgcaacatcccgactggtaccgtggtgcacgcaatcgagctccgcccgctgggtggcgccaagatcgcccgctccgctggtgcagccgtgcagctcgtcgctaaggatggcgcttacgcccagctgcgtatgccgtccggagaaatccgcaacgtggatgctcgctgccgcgcaaccgtcggtgaggtcggcaactccgatcacgccaacatccagctcggtaaggcaggtcgtgcacgttggatgggcaagcgcccgatcacccgtggtgaatccatgaaccctgtcgatcacccgcacggcggtcgtacccgcggtggcaagccgccggtttctccgtggggcaagggcgaggttcgtacccgccgtccgaagaaggcttcgaacaagatgattgttcgtcgtcgcccgaatggtaagaaccgtaagtaagggagtgtcgagtagatgactcgtagcatcaagaagggccccttcgtcgacgcccacctgcagaagaaagtcgacgagcagaacgagaagggtacgcacaacgtcatcaagacgtggtcccgtcgttcgatgatcacccctgatttcatcggacacaccttcgccgttcacgatggtcgcaagcatgttccggtgttcgtcaccgaatccatggttggccacaagctcggtgagttcgccccgaccaagaccttcaagggtcatgtgaaggacgacaagaaggcacgccgctaaaggagagtaaggacacatggaagctaaagcaatcgctcgtcacgtccgcgtgacgccgcgcaaggctcgccgtatggtcgacctcatccgaggcaagaaggcgaccgaagccatcaccattctgaagttcgctccgcaggacgcatcccttccggtgcgtaaggtcctggagagcgccatcgcgaacgctcgcgtgaaggccgacaaggccggcgagccgttccgtgagaacgacctggtcgtgaaggagacctatgtggacgaaggcgtgacgctcaagcgtttccgcgctcgtgcacagggccgtgccgctcgtatcaacaagcgcaccagccacatcacggtcgtcgtcgctaacaaggaaggaaaccgctaaagatgggtcagaagatcaatccgtttggctaccgcctgggaatcactgagaaccatcgttccaagtggttctccgattccaacaaggttggcgaacgctaccgcgacttcgttctcgaagatgacgccatccgcaaggccatgagcaaggatcttgagcgtgcgggcgtgtcccgtatcgtcatcgagcgtacccgcgaccgcgtgcgtgtggatatccacaccgctcgcccgggtatcgtcatcggccgccgtggcgccgaagccgagcgcgttcgcgccaagctcgagaagctcaccggcaagcaggtccagctcaacatcttcgaagtgaagaacgcagcactggacgcccagctcgtcgcacagggcatcgctgagcagctgaccaaccgcgtgaccttccgtcgcgcgatgcgtaaggcccagcaggatgccatgcgtgcaggcgccaagggtatccgtatcaagctctccggccgccttggtggcgccgaaatgagccgttccgagttctatcgcgagggtcgcgttccgctgcagaccctgcgtgccctcatcgattacggcttcttcgaggccaagaccacttacggccgcatcggcgtgaaggtctggatctacaagggcgatatgaccgagcgtgagttcgaagagcagcaggcacagcagggcaacaaccgccagggacgtcgcggcgatcgccgtccgcgccgtggtcagcgtaacgctgcccagcagcagaacgcagcagcagaggctccggccgcagctgaggcacctgccgcaacggaaacgaaggagtgagctgagaaatgcttatcccaaagagaaccaagtatcgtaagcagcaccgtccggtccgccgtggtatgtccaagggcggcaacgagatcgcattcggcgatttcggtattcaggctcttgctccagcttatgtgaccaaccgtcagatcgaggccgctcgtatcgccatgacccgctacatcaagcgtggtggccgcgtgtggatcacgatcttcccggatcgtccgctgaccaagaagccgctcggcacccgaatgggttccggtaagggtactccggaattctggatcgctaacgtccacccgggtcgcgtcatgttcgagatcggtggcgtgtccgaggatgtcgctcgcgaggctctgcgccgcgcaatcgacaagctccctatgaagtgccgtgttattgctcgtgaaggcggtgacatctgatggcagtcggaactgcagactacaccatgaagaatctgaacgagaagaccaacgaggagatcgagggcttcctcaagaagtccaaggaagagctgttcaacctgcgcttccagtccgcgaccggtcagctcgaaaataccgcccgcctcaaggcggtcaagcacgacatcgccaggatgtacaccgtcctgcgcgagcgtgagctcggcatcagccaggcccccgaggcgaccgaaacgaaagctgaggagaagtaatggctgaagagcgtaacttccgcaaggttcgtcgcggttacgtcgtgtccgataagatggacaagacgatttccgtcgagctcgagcagcgttcgacccacccgctgtacggcaaggtcgtgcgttccactcgtacggtcaaggtccatgatgaacacaacgaggctcacattggcgacctcgtgagtattatggagactcggcccctgagcaagaccaagcgttggcgtctcgataccatcatcgagcgcgctaagtaaataagttcggcaaggctccgtgagtcaccccgcctgcttcaagcaggcaggcggggtgcttggggagaaccagctcggctaaggagaatcaatgattcagcaggaaacgcggcttcatgtcgccgacaacacgggtgcgaaggaactcctcgccatccgagtgctcggcggatcgaagcgacgctatgccggcatcggcgacgtgatcgtcgcctccgtcaaggacgccatccctggcgggtcggtcaagaagggcgacgtcgtcaaggctgtcgtcgtccgcactgtcaaggagcaccgtcgtgtggacggctcctacatcaagttcgacgagaacgctgccgtcattctcggctctggccgtgaaccgaagggcactcgtatcttcggaccggtcggtcgtgaactgcgcgacaagcgcttcatgaagatcgtgtccctcgccccggaggtgatctgacatggcagccaagattaagagcggcgacctggtcaaggtcattcgcggcaaggatcgcggcaaggagggcaccgtcaagcaggtgctcaaggacgatcgtctgatcgttgaaggcgtgcagatcgtcaagaagcacgttcgcgctacgcagcagggccagcaggccggcatcgtggctgtcgaggctccgatccatcgctccaacgtgatggtcatcgatccggagaccaagcagccgacccgcgtgcgcatcgtcgaaaaggaagaggctcgcgacggcaaggtgaagaccgtgcgtgtgcgtgttgccaagaagtccggaaaggagctggcatgaccgataccactgtcgaagcgccggcaactccgcgcttgaagcagaagtacaacgagcagatcgtgccggagctggagaaggaattccactactccaacccgatgcaggtcgctcgcgtccagaaggtcgtcgtctccatgggcgttggcgccgctgctcgcgactccaagcttatcgaaggcgcagtcaaggacctcaccctgatcaccggccagaagccgaagatcaccaaggctaagaagtccgtcgcacagttccacctgcgcgaaggccaggccatcggcgcttacgtcaccctgcgtggcgagcgtatgtgggagttcctggatcgccttctgaccatggctctgccgcgtatccgcgatttccgtggcatcaacggcaaccagttcgacggtcagggcaactacaactttggcctcactgagcagtccatgttccacgagatcgatccggattcgatcgatcaccagcgcggtatggacatcaccgtggtgaccagcaccaaggacgacaaggaagctcgcgtgctcctgaagcacctcggcttccccttcaaggagaactgatatggcaaaaaccgctcttaagaacaaggcggccgctaagccgaagttcaaggtgcgcgcttatacgcgttgccaggtctgcggtcgtcctcactccgtctaccgcaagttcggcctttgccgcatctgccttcgtgagaaggcccaccgcggcgagctgcccggcgttacgaagtccagttggtaaataacgacgctgaaggtccgcggcccaatcgctcaatggagcgtgcgggcggcggaaaccacggcgagaaagggcaataagcccaaatgacaatgacagatccgatcgcagacatgcttacgcgtctgcgtaatgcgagcgcggcaaagcacgagaccgtggatatgccgtactccaagttcaaggcgaacatcgccgagatcctgaagcgtgaaggctacatcaaggacttcaccgccaaggaagccaaggtcggccagactctcgaggtcaccctcaagtacggtccgaacggcgagcgttccatccagggcatcaagcgcatctccaagccgggcctgcgtcgctacgcaaagtccgatgctctgccgatgccgctcggtggccttggcatcgcaatcatctcgactagctcgggactgctgacccagaaggaatgcctcgatcgaggcatcggcggcgaaatcgtcgctttcgtttggtgagaaaggagagctgaaacatggcatcgcatattggtaagctccccgtcaccattcctgctggcgtggaagtcaagatcgacggtcagtccttcaccgccaagggcgccaagggcactgactcctacgagattccggaaggcatcaccgctcaggtcgaaggcaacgagatcatcctcgttccggctgacgatctgcgtccgacccgtgcaaagcacggcctggctcgttccatcgtggcgagcatggtcaagggcgtgcacgagggttacgccaagactctggacatcatcggcaccggttaccgtgctcaggcgaagggcaagggtatcgagttctccctcggttactcccacaccattaccgttgagccgccggaaggtatcgagttcgaactgccgaatccgaaccaggtgatcgtcaagggtatcgacaagcaggctgtcggccagtgcgccgctaacatccgcaagcttcgcgctccggaaccctacaagggcaagggcatcaagtactcggatgaacgcatcctgcgcaaggctggaaaggctggtaagtaatgagcgtccagattttcggtaagggcaagaaggtcgcgcttcagcgccgtcacgctcgtctgcgcaagcgcatcagcggtaccccggagctcccgcgtctggtggttacccgttccaaccgtcacatggttgcccagatcatcgatgacaccaagggcattaccttggtgagcgaatccactctgatgagcgatttcgcaggtttcgaaggcaccaagaccgaagctgccaagaaggtcggcgaactgattgccaagaaggctcaggacgcaggcatcaccgcggttgtgttcgatcgtggcggcaacaagtatcatggccgcgtcgcagctgtcgctgaaggcgcccgcgagggaggtctggcactgtgagcgacaacgaaaaggaaacccaagtggctgaagaaactcagaacactcaggctgctgctgaagctaccaacgaggatcgcaagtcccgtcgtggccagcgtggtgagggtcgtcgtggcgagcgtcgcaaccgtcgtgaggaatctcacgagaacgagatgctcgatcgcgtggtgaccatcaaccgtgtgtccaagacccacaagggtggtcgtacgttcagcttcgctgccctcgtggtggttggcgacggcaacggcaccgtgggtgtcggctacggcaagtcccgtgaggtcccggctgcaatcgctaagggccagctggatgccaagaagcacatgttcaccgttccgcgcatcaagggcaccgtcactcacccggtgatcggccatgatgctgctggcaccgtgctcctgcgtccggctgctccgggtaccggcgttatcgccggcggtgcggtccgcgccgtcatggaatgcgctggcatcaccgacgtcctgaccaagtcgatgggctccgccaccgccgttaacgtggtgcgcgcaaccgtcgacgctctcaagaagctcgaagagccggaagagatcgcagcccgtcgtggcatgtccctcgaagaggtggctcctgactccctgctgcgtgctcgcgccgaaggcatcgccgaggctcgtaaggcccgtgaagaagcacaggccaaggccgctcagaaggacggtgagtgatgactaacctgaacatcaagctgcaccacggtctggtgaactccactccgaagcagcgtgctgcggctcagactctgggcctgaacaagattggcaagaccgtgacccgtgaagacacgccggccctccgtggccagctgctggtcctccgtcacctggtcaccgttgaggaggctgactgattatggcagatatcctgcagatgcatgacctgaagccggctccgggcgccaagaaggatcgcattcgcgtcggccgtggtgaaggctccaagggtaagacctcgggccgtggcgacaagggcaccaagaagcgttaccaggttcgtccgggcttcgaaggtggccagctgccgctgtacatgcgccttccgaagctgcgtggcttcaagagcccgttcaagaaggaatatcaggtcgtcaacgttgctgctctcgcggaactgttcccgcagggcggcgaaatcaccgttgccgatctggtcgccaagggtgccgtgcgtaacggctacccggtcaaggtcctgggcgacggcgaggtttcggcagcctacaccatcaagggtgttaaggcttccgcttccgccaagtccaagatcgaggctgccggcggctccatctccgaggactgattccaaggaatgtagagctgactgaagcttgcaagtgaggcttctcccgcttagacgggggaggcctcacttcgttttggtccagtacggggaacaaaacgaaaacaatgcctcgaaatcttgtaaaaaaccgacaaaggatggaacactccacgtgtaggtagacgccgtacgctagactcgatcggtagagtctgttttgcatgggtgcgcaggcgcgcacgtcgatggaaggaatcccaggtgaggacgttaatccaggccttgaaaaccaaggagttgaggaacaagatcctcttcactcttggtatcatcatcatttatcgtattggttcgttcattccgaccccaggcgtcgactataaggtcgttcagcagtgcgtcggttcgatgaacagcacctccgaaaacttcattggtctggtgaacctcttctccggcggcgcaatgttgcagctatcgatcttcgcactgggcgttatgccgtacatcacggcatccatcgtcatccagctgctgcgtgtggtgattcctcgcttcgaggcgctgcacaaggaaggccagtccggcgaagccaaactgacccagtacacccgttacctgaccatcggccttgcagtgttgcagtccaccaccattctggtgaccgcacgctccggcgccctgttcaactaccagtgctctcaggttgtgcctgacggttccgtctggaaccttgtggtcatggtgctcatcatgactggcggcaccggcctcatcatgtggatggccgaattgatcaccgacaagggtctcggtcaaggcatgtccatccttatcttcatgtccatctgctccggcttcctgccgcagctttgggagatcggttggggcaccgatggcgccgatggcgattgggccaagttcgcggccgtcgtcggcgtgctgctggtcatcatgatcctcgtcatctatgtcgagctttcccagcgtcgtattccggtgcagtacacccgtcgtatgatcggtcgtaagatgtacggcggatcctccacctacctgccgctgaagatcaatatgagcggcgttatcccgccgatcttcgcgtcctccattctggccatcccgactctgatcgcacagttcggcaattccgaccagtcttgggtcaaatggatcaactccaatctggccaacaccacttccgtgtggtacatcgccctgtacgcgctcatgatcgtgttcttctgcttcttctacacggagatcactttcaatccggacgaaaccgcggacaacatgaagcagtacggtggattcattcctggcatccgcgcaggcagcgccaccagtcgttacctgagctatgtgatgaacaggcttaacaccgtcggcgccgtgtacctgctgttcgtggcgctcatcccgaccgtgctcatcatggcgctcgacctcaacaccaagctgccattcggcggcaccaccatcctgatcatcgcaggcgtcggcctcgacaccctgcgccaggccaaggcccagaccgagcagttccagtacgctggtttcctgttcgagggcactgaccacaaggaaggcaagtaagacctgaatcgtgatgccgcttcgtcatggggcggtatcacgatttttatgtaaccaatcgagaatcagaaagcctcgcaagaggctaaatgaaacggagaataacatgcgactgctgattatgggaccgcagggcgtcggcaagggcacccaggctgcgctgctgagcgagcactacggtattccggcaatctccaccggcgatatcttccgctataacatcaagaacaagaccgagctcggtgttgaggcactgaagtacatcgacaagggcgaactggttccggacgagctgaccaacaagatcgtcaaggatcgtctggccatggatgatgccaagaacggttggatcctcgacggctatccgcgcaacgcatcccaagttgaggcactggacgccatcctcgccgatctgaacactcctctggacgctgtggtggctctcgacgctgaccatgacgtgcttatggagcgcatgaagaagcgtgccgagatcgaaggccgttccgacgacactccggaagccatcgccaagcgtcttgatgtgtatgccaaggaaaccgctccgttgctggccacctatgaagagcgcgggctgctgaagaccttcaacggcgtcggctccgtcgaagagatccagtccaccatcgtggctgagcttggctgatatagctgaaaatcgggcagattcaaatcgtatgcaacgataagaaagctcaataaaataccacaaaacaatcgaaaacgggaattgcgacacgccgaacgtgccgtagctcccgttttcgtgtattcttgcaagttggtgtgtcttcgggcacgcatagtaatcgccaaagaacggaacgaggctcatggctaaagacggtgtgattgaagtcgaaggacaggtagtggaagcactgccgaacgcgatgttccgcgttgaactcgagaacaagcatatcgtgctcgcaaccatctcgggcaagatgaggaagaactatattcgcattctgccgcaggatcgtgttgtgctggaaatgagcccttatgatctgaaccgcggccgtattacgtaccgttacaagtaaggtacacaagcaaaggaaaaccatgaaggtcagccctagtgtgaagaggatctgcgagaactgccgcgtgatccgtcgtcacggccgcgtcatggtgatctgcatcaacccgcgccacaagcagcgtcagggctgagagcagatccagcggcataataagtacaggcgctgagtcacagatcgcgcaagcggtatgaaccccgggtacgcaggcccgggccgggaaaccggacgactcggtgcaagacctgcggaaaacagaaggaatcgcaatggcacgtcttgccggagtcgacatccccaatgagaagcgcatcgagatcgccctcacctacatctttggtgtgggtcgcactcgtgccaaggaaacgcttgccgcgaccggtatcaacccggacattcgcgtcaaggatctgacggatgagcagctgatcacgctgcgtgactacctcgagggtaactacaagatcgagggcgatctgcgtcgtgaaatcgatgcggatatccgtcgtaagattcagatcaactgctaccaaggccagcgtcaccgtaagggacttcctgtgcgcggtcagcgcaccaagaccaatgctcgtacccgcaagggcccgaagcgcacggtcgccggaaagaagaaggccaccaagtaataggtggctgtcagttcagaccacgagacgtaagtttcatcgcctgaacaacaaagcaaattcgttattaggaaacgagggtcaatggcagctcaaaagcaagccgcgcgcaagccgcgtcgccgcgaccgcaagtcggtcccggttgggcaggcgcacatcaagtccactttcaacaacactattatttcgatcaccgacccgtccggcgcagttgtgtcctgggcgtccggtggcgatgtcggcttcaagggctcccgtaagtccacgccgtacgccgctggtatggccgctgaatccgcagcccgcaaggctatggagcacggtctgaagaaggtcgacgtgttcgtgaagggcccgggttccggtcgtgaaaccgctatccgttccttgcagtccgccggactcgaagtcggttccatcaccgacgtcaccccgcaggcacacaacggcgttcgtcctccgaagcgccgtcgcgtctgagcactagaagaaatcatcaatccaacgccgcttatggccggtgagtgcaccaccggcctgaagctgaaaggataaccacagtgcttatcgcacagcgtccgacacttaccgaggaatctctcaaccctcagcgttcccgcttcaccatcgagcctctcgagcctggtttcggctacacgcttggcaactcgctgcgccgtaccctcctgagctccatccctggagcggctgtgacttcggtgcgtatctccggcgtcccgcatgagttcaccactctgccgggtgttgaagaggacgttaccgagatcctgttgaacatcaagggcatcgtgctcaccagcgaatacgatgagccggttgtcatgtatctgcgcaagagcggcaagggcgaggccaccgcgggtgatatcactccgccggccggcgtcactatcgccaacccggatatgcatatcgcaactctcgctgaagatggcgaactcgagatcgagttcaccgtcgagcgtggccgcggttatgtgccagcccagatgaacaagcaggataacgccgagatcggccgtatcccggtcgactcgatttactccccggtgctcaaggtgagctatcgcgtggaagccactcgcgttgaacagcgcactgactttgacaagctcatcctggacgtggagaccaagccggcaatctccccgcgtgatgctgtcgcatccgcaggctccaccttggtggaactcttcggcctgtgccgcgagctcaacgcccaggctgagggcgtcgaggttggacctgccccggtggcagaggaaaccaacccggagatggccgttccgatcgaggatctcaacctcacccagcgcagctacaactgcctgaagcgcgagggcatccacacgatcggcgagctggtcgcccacaccgagcaggatctgctcgacatccgcaatttcggtatgaagtccattgacgaagtcaaggaaaagctccagtccttgggtctggccctcaaggcttccccgctgggcaacttcgataccaacaacctcgaaggcggcactttcttctcgccggaagacgagtgattcgccgcttttgacctaaccgcttcgtcggattcggatgttcgggcaactgcccacctgaatccgacggggctttcaaggagaaacaatgcctacaccaaagaagggtccgcgtctggcctccagcccggctcatgagcgtcttatgctcgcgaacatggccaccagcctgttccagcatggccgcatcaccaccaccctgccgaaggccaagcgccttcgtccgctggttgagcgcctgatcacgctcgccaagcgtggtgatctgcacaaccgtcgtcgcgtgatgcgtgtcatccgcaacaagtccgtcgtgcacaaactgttcaccgagatcgccgagcagatggagcagcgtgagggtggctacacccgtatcgtcaagatcgctccgcgtcgtggtgattccgctccggcagccatcatcgagctcgtcaccgagccggtgagcccgaagcaggccgtggtcaaggaagctgaagccgcaaccaaggttgctgctgaagaagctccggttgtcgaagaggcaccggtcgaggctccggaagccgcagctgaggaagccaccgcagagaacgccgagtgattggcatcgaaaaggcttgactagctgatgaaaaggctgggaatcgaaaggttcccagcctttttgctatgtatcgttccgttgttatgcgccttttgttatgctcaatgccgtgagattgcgaatcgacttggcatatgacggcactggcttttacggatgggccaaacaacccgacatgcgtaccgtgcagggggaaatcgaacgagtgctgcataccgttcttcgtgtaccggaaggcgatgatgacgagccgctgcgcctgaccgtcgcaggtcgtaccgataccggcgtgcacgcgtcgcaccaagtttgccatctcgatatcaatgaagagacacttgcacgttgcatcgggcatatgcaggtcgaaccggcgatggcgttgacgcgacgactgcaacgcatgctgccgaacgatattgccattcgttccatcaaagaggcttctaaaggattcgacgcacgtttctccgcgctggaacgcacctacgtatatcgcattgccgaccgatcaagcgaaatcgatccacgtaccagaaattgcgtgctgcatatcgacgatgatctcgacatcgaagccatgaacaaggctgctgaaatgacgatcggtctgcatgatttcggctcgttcgcaaccccgaatcctggaggcaccaccatacgtgaggtgaaaaccgcgtattggcgtcgtataccgcagcatccgctgatcgacgacggagccaccatgggggagcggtaccgaacgcccgccttggaatcgggactgctctgcttcaccatcgtcgccgacgcattcgcacgcaatatggtgcgttcgttggttaacggttgcgtacaggtcggtatcggcaaacgttccttggattggttcgccgaaaaaatggcgactccgttgcgtgaaggcagcaccggtccgatcgctccgcaaggattgacgctcgaacatatcgaatatccggaagacgaccagctggcgattcgtgccgaagcgattcgtgcgaagcgcactttgtaagagcacatactgtatagcagcacagaagatcgcactatacgatcgcaccagatatcgcatcgcaaaactgcatcaagcaatcgcaagaaaaacggaaaacgagatatagttcgaaaagaacacgcgaatcatgcgaaatgccatgacgacgttacgtcgttctcacgagtccgtgaccgagacgcaatcgtaataattagggtaatcgaacgccagtacgtcttctatcgaggattgagcggccttaagacgggcatgcattttcaggggtagaagaagtgtgcgacgatgaatgaaagcataaaagttgcagatcgtctaaaacaataaccttggctcctatgtgctcctacgtgccacagggctgtaagcaataaaaaaaccgaagcgccattgctccggtttttctacttgcggataaggcgagattcgaactcgcggaggggttcgccctcacacgctttcgaggcgtgctccttagaccgctcggacacttatccattgtgctacttgaaaacaagcaacttcattattttgccacagctttggcgattgtcaaatccgattgagggatttttgcgatgtctgcgattgctcggcgtgtcttattcgcgggaacactgcgtcgcattgcgtgaagacggttgcgcggacagcgtacgcaagtctgcgctatgcgaatagcgcttcgtcgaatgccggataaccccaggcgagtgccagatccacgcggtcggcgatcatgctggcgagcatgcccagtgactgttcacgggagtcatccgaatggtcgtccgaggttgtttgggacttcgtcgaggcgttcgacgaagtcgagcttgccgtaacggctgcgatttcactgcgcgcgcaattcatttccaggacggcatcggttggcgcgtacaagcccgttgcggaatccacgatggtattaggattggcgagcagctgcgtgacatcataggttttcgcacgattgtcttcggctccggaaatagaaatcaggcgttgcgaagtggttttatgacgatcgctgatgtcaagcgtcgcatgaccgaaggaacgcgcggcgaacacctccatcgcgaaccccacctgatcttccgcagcagccatggctgcaagcgaatccgcgtcgacgtcaagcgagtcaatgccatcgcatcgtgacagcgtgggctgtgcgatgtcaatcgcaagccgtgaggccatcaatctgacggcgtgacgggcctgcgcgctgcgcaacgtgccatcggcgaatcgcgccgggcaatatgccgcggtgttggcccaatctgaaaccgcctcctgcgcggcaagatagcgcatgacgatatggcgtgacctgtctgccatgatgtcggcgttggcagtcgcgtctgcatacgccttttcgcaaggacttggctgttgttcggcttcggcgcggcctgcgattcgaggagcggaacacgcggctagtgatgccacaagggcgctcgcgcacaccaagacgcaggcgcgtctgacagtcgacaaggccaaggggaaaaacggggagcgtgtctgcatgaaacattagactagtagtcgactgtgaccattgggccgagcgctcggaataacttcatataggaggtcttggaagtatggaactggacctggcaggaatgcaccagctcgcagctgggcagggaatcgatcccgagacgctggatgccgcactctcggaagcattgcgactggcatatctgaaaacgccgcacgcggcgaagcatgctcgtgtggagcttgatccgcgtgccggaagctttaccgtttgggctcaggatgagatccccgtcgagccgaccgaggatgatccgcaccctgcgccgactctgggcgaggaatatgatgacaccccgcgtgacttcggccgtctggccgccgccaccgcgcgtcaggtcatcagccagctgttccgcaaggccgaggacgacaaggtgttcggcgcgttctccgggcagaagggcaagctgatcaccggcattgtgcagcaggatgtgaaggacacctccaatgtgcacgtggccgttggcgacgtcgaagcgttgctgccgcgtcgtgaacaggtgccgggagagcgttaccgccatggtgagcgcatccgcgtgtatgtggtgaatgtcgcacgtggcctcaaaggcccggaaatcgtggtgtcccgctcccatcccgagctggttcgccgtctgttcgaacgtgaggttccggaactggtttccggtgccgtctcgatcatggccatcgcgcgtgaggccggtgcccgtaccaagatcgcggtgcgcgccaacaccgagggcgtcaatccgaagggcgctctgatcggccccggcggtgctcgcgtgcgtgcggtgatggagaaccttgggccggagaagatcgatatcgtcgactggtctgccgatccggcgaagttcgtcgcggcggcactgtctccggcggtcgccaccggtgtgcaggtgatcagcgagaagaaccagaccgcaatcgccttcattcatgatgatcagctgtcgctggccatcggcaaggaaggccagaacgcacgtttggccgccaagctgaccggatggaagatcggcatcgaatccgccgaggcacacgccaagaagatggccgaagcgcaggcttcgaccagcggggaaaccgccgaataaccaacactttcagcaacggtaagcccgtgggcgttcaatccacgggcttgagtatgctggactcgataatccaaagcgtgggggtacgtgccgtcatgcccagggaaaagacgaggtatcacgaacatggttgcacgatgagaaggaacaagctcgccgtgaatcagtagcggtcgcgctcgtatgcgcgcggcccaagataggagaaattgagtgccgaaagcacgcgtatatgaacttgccaaggaacttggcgttgacagcaagactgttttgaacaaacttgaggcgatgggcgaatttgtgaagtccgcatcgtctaccgttgaacctccggttgcccgtaagctgaggaatgctttcgcttccaacgcgcagggcaacgcatccgaatccaagaagcctgcggtcccggccaagaagccggctgccccggcagcttcgcctactcctgcgcctcgtgccactccggctgctcccgcggcatccgcggcaaagcctgccgctccaaagccggcacgtcctgcagcatccaagtccgaagccccgaagcccggccagcgcatgcctcgtccgggtgattctcgccagcatggcaatcgtgccaacggcaacgctccgcgtccgcagggcgaacgccgtcagggcggcaagccggctccggttccgggacctcgcgcacagcgcaacaataacaataccaatgctccgcagggcggcaatggcaacaatgccgccaatggtgcgaagccgcacactccgggcccacgtccgggtaacaatccgttcagccgcaagcagggcatgcataccccgactccgggtgacattccgcgtccgcatccgatgaaccgtccgaacgccaacaacaataacaacggcgaaggtcgtcgcggcggccgtccgggtcagggcggcggccagcgtggaggtttccgtggtcgtccgggccaaggcaccggtgcgaagccgggtcagtggggccagcatcgtccgggtcagggcggcggtcagcgtccggcaggtggtggcaaccgtttcggtggcggcgccaataccaatggtggcggcttccagggcggcaacagcgctccgagcaacggtccggcacgcggcggcggccgcggtcgtggcggtgctgcaggcgcgttcggtcgtcagggcggcaagtcctcgaaggctcgtaagaaccgtctggcaaagcgtcaggaattccaggagatgaaggccccggtcatcggcggcgtgcgtattcctaccggcaacggtcagaccgttcgtctgcgtcagggcgcatcccttgctgatctggccgagaagatcaacgtcaatccggcggcactggtcaccgtactgttccaccttggtgagatggccacggcaacccagtccttggacgaatccaccttccagatcctcggtgaggaaatcggctgggacatcaagattgtgtccgccgaagaggaagacaaggaactgctgcagcagttcgacatcgatctggacgaagaagaacttcaggaagatgaagatctgaagccgcgtccgccggtcgtcaccgtgatgggccatgtcgatcatggtaagacccgactgcttgacaccatccgtcgtaccaacgtcatcgcacgtgaggccggcggcatcacccagcgtatcggtgcataccaggtgaccgtcgatctcgaaggcgaaccgcgtaagatcacgttcctcgataccccaggccacgaagccttcaccgccatgcgtgcccgtggcgccgaactcaccgacgttgcgatccttgtggtcgcggccgatgacggcgtgatgccgcagaccgtggaagccatcaaccacgctcaggcggccaacgtgccgatcgtggtggccgtcaacaagatcgataagccgggcgcgaacccagacaaggtccgtggccagctcaccgagtacggcctcgttccggaagagtacggtggcaacaccatgttcgtcgacatttccgccaagcagggcaccaatgtcgacaagctgctggaagccgtgctgctgaccgcggacgccgaacttgatctgcgtgccaacccggatatggacgctcgcggtgccacagtggaagcccgactcgacaagggtcgcggtgccgtggcaactgtgctcgttcagtccggtactctgcacatcggcgattccatcgtcgcaggaacgtcgtatggccgtgtccgcgccatgctcgacgaaaacggtacccatatgaaggaagccacgccgtctactccggtgcaggtgcttggtttgacctccgtgccgacagcaggcgatctgttcctggtggcctccgatgaccgtaccgcacgtcagatcgccgaaaagcgtcaggccaccgagcgtgcggcccagctggccaagcgtcgtaaggtcgtgtcgctcgaaagcctcaaggagcagttcgccaaggctgaggtcgacatgctcaacatcgtcatcaagggcgattcctccggttccgtcgaggcgctggaagattccttgatgaagatcgaggtgtccgacgaggtcggcatccaggtgatccaccgcggtgtcggtgccatcacccagaacgatgtcaacctggctaccgtcgacaaggccgtcatcatcggcttcaacgttcgtccgaaccgtcaggtggcggatatggccgaacgcgaaggcgtggaaatcaagtactactcgatcatctacaaggccatcgaagacatcgaagcatccctcaagggcatgctcaagccggaattcgaagaggtcgtcacgtcccactccgagatccgcgagatcttccgttcttccaagttcggcaatatcgcaggtgttatggtgcaggacggcgaagtcaagcgcggtacgaagtgccgtattctgcgcaacggcatcgccaccgtcaatgatctcgaaatctcctcgctgcgtcgcttcaaggacgatgtcaactccgtcaaggaaggctacgaagcgggtatcaacctcggttcgttcaacgacatcgagcttggcgatatcatcgagaccttcgaaatgcaggaaatcgaacgcaagtagtcgattgattcgaatcagcaatcgataacaagaaaggaacgcccacagctgacatacggctgcgggcgttccgtaatacaacagaacttacctgattaaaggacaacaatggcaggaaccaatcctcgcgccgcacgcatcgcggcgttgatccaacgtgtgatcgcatcctccatggaggcgcaattgcacgataagcgtctcacaaacgtgaccatcaccgaagtgcgcgtgaccaacgatctgcagatcgccaaagtctactggactcagcttggccgtgaaggccatgagcagggcgaacgccgccgtgcacagcaggcactgaaccaagccaagggtcgtctgcgttccctcgtgggcaccaaggccggtctgcgtttgaccccgcagctcgaattcgtattcgacgaggtgccgggcgaggcgcatgagatcgaagacattctcgccatcgcgcgcaagcgtgacgaagaactcgccaaggctcgtgaaaccgcccagtatgcgggcgaagccgatccgtacaagcatccggaagaggatgacgacgatgatttcgacgatgatgacgtcgaagtcgaagattgggatgatgacgaagaagcctgaacattccggcctgctggtcatcgacaagccgcagggggtcaccagccatgacgtggtcgcggccgtgcgcggcgccctgcatatgaagcgtgtcggccatgctggcacgctcgacccgatggccaccggcgtgctggtggtgggtttcggcaatgccacgcgactgctcaactacattgtcgaccataacaaaacgtacgaggccaccattcgccttggacagcgcaccactacggacgatgccgaaggcgagctgttgccggcgggggagcgggcagtgaactttccttcgcgtcaagccgtggaacagctgatcacagaacggttcaccgggcgcatcgaacaggtaccgaacgtctactccgccattaaggtcaatggccagcgtgcctatgatctggcgcgcgaaggcaaggatgtggagcttaaggcacgtcctgtgaccatcgaagagttcaacgtgcggcaggcgcgttacggctacacgcatagcgatcgtgccggcacggaacttgctggcgcagtcgtggccgagagggcaggagatggatggattgccgacactgcaccgtatgaagatatgcagcccgttatggaactcgacgtgaccgtgacctgttccgcaggtacctacattcgcgcgctcgcacgcgatctgggtgaggaactcgggttgggaggccatctgacgatgctgcgacgcacacgtgtcggcagattctcagtgaatatgcccaacgtcatgagcgcccacgctgaatccaaaacattcaccaatcgtgaaggcatggaagtgacgcgcaatcgtgcagtgcttgacgatgcagatcatgcgctcgatcatgcgctcgatcccgtggccagcgcggcggcttccatgaatatgctggctgtgagcgatcaggaagcggccgacttgcgtttcggacgcagaatcgcgcatgacatacgtacgaccacggcggcgtacgttgaggaaaccaacgatttggtcgccatcctcgaacgtgcgaaacgcggtgaggctaaaccggtcgcggtattcaactgaaccatccaatcagactacagatacgaattcatacacaagaaggacatgatgaagacaatcacgctcacgcctgatgccagcggcatggtggattggcctacgctgagcaacgataagaaatccgtggtgaccatcggttcgttcgatggcatgcatcagggccatcaggcggtgattcgccgcgtggtggaactcgccaagaaggaacagtccttctccgtggtggtgctgttcgatccacgcccagcgctcgtgcacggctacgcggcgcaaaacggtggccaggagccgccggcgggcatgatcgacgcgcaggcgctcaccagcatgcaggagcgtctgcgcgccatcaacaagctgggcgtggattacacgctcatcgtgcgttacacgctggcgttcgcggcgaaatcgtaccgattcttcctcggacaaatggtgggcaagctgggcatgcgctcgctagtgctcggatccgatgcggccatgggtgcgaaccgtgccggcgatgtgaaggccatcgagaatctggcgctcgccaccggcgtgttccagcttgacgtggtcgacgatcgtggaccgggcgaaacccgcgtgccagccaatgcgaagccggttatgcccaccgaccatggtgagccggccgatccgctggaaggcgcgtccaaggcggaacgtcgcgcatggagcaagaaaaaccaggcgaaggccgtgcgcgtgtggagctccacgaatgtgcgctacctgctgggccatgggcgcatcaaagacgccgacgcgattctgggacatccgcatgccgtggaaggcaccgtggtgcatggcgaggaacgtggacgcaccatcggcttccccacggcgaatctgagtgagaatgtggcaggctatctgccggtcgacggcgtatacgccggttggctcgtggacctgggcgcgaagacggcggacgatgatacgcagggcgcttccgaaggtgtttcgcagcagttcgattcctcttccgtggacgcgcgacttgccgatcattcgccgtatcgttggcctgctgcgatttccatcggcaccaagccgacgttcaacgaaacgaccggcatgaatgagcgtgtggtcgaagcctatgccgtcaccgacgattggcttgatttatacgatcaccaggtacgtgtggaattcgcaggattcctgcgtccgcaaatcaaattcgattccgcacaggatctgatcgacgagctgaagcgcaatgtcgaggaaaccaagcgaattactgcctgatgctaatcacaacgatgatcgcaataataatcacgataatgacagtgattaatgaatgctgatatttccagtaaaaacgtatcagtattcaaaaatagtggggctcttacgtaagcatctacgtaagagccccacttgtataggttaaaaaaataacataatgtatatgcttcgcgtgcatacatgcaaaaacggtatgtagggtgtgtattatcgcaacatggcgccaagcgcatcctgcaatgtgtcgacctgaacgatcgacaatccgggaattgcgatttctctacgtaatgtcggcactacagcggtggtgaaaccaagacgggcggcttcgcgcaaccggtattccaatcgcggcaccggacgcacctgcccggtcaacgaaatttcgccaatcgcacatgtggtgcggctgatcgccttcgatttcgaggcgctcgccaatgcgccgacgatcgccagatcgcatccgggctcgcgcgcctggcctccggcgatggtggaaatatacagatcgttcgccaaaagattgacgttgccatgcctgtatagcaccgccaccagcatggcgatgcggttggcgtcgacgccgttcgcggcacgtcgtggcgttggcagtacggatttggtgaccagcgactgcacttcgatgggaagactgcgatgaccgtccaacgtgaaggtcacgcacgtgccctccaccggagagggatctgcggaattggacgaggaaagaaacagtccggacgggtccgtcacctcttcgatgccttcgccgctcatatcgaaacagccgacctcatcagtagggccgaaacggtttttcaccgcgcgcagcatacgcaatgcggtttcggtgtcgccttcgaactggcagaccacatcaaccaaatgttccaacgtgcgcgggccggcaatcgacccgtctttggtgacatgaccgaccaacaataccggaatatcaagcgttttggcggtgtcgatcagcgcgctcgccacttcgcgcacctgagtcgagcctccggagatgccatcgacttcctgcgagacgatggtttgcgcggaatcgacgatggccagcgcaggcttgcattgttcgataagccccagcgcggtcgacaggtcggtggtggcggccagaagcagattcggttcgaccgcgccgatgcgcgaggccctcatgcgcacctgcgcctgcgattcctcaccggaaatatagagcaccgtgttgcgttcgggctgtgctgcggaaagacgggcaacattgcctgcggtctccagcagcagcgttgatttgccgatacccggttcgcccgcgataagcgtgacggaaccgggaacgatgccgccgccaagtacgcggttgaattccgtgaacccagtgtcgattctggaaatgttttccgtactgatttccgtgatcggtttcgccgcggaatcgggcactgcatgcgatagcgtacgcgatgtgcgtccgggagcggcggtgcgtgacgatgcggaggggcgcgcttcatggaattcctcgatggtgccccactggccgcattcagggcagcggcccagccatttcggcccgctccagccgcattcggaacatacaaattgcgaggacgtctttgccatatcgctgacaatacggatattttgggacaatcgttttcggagatattaagggggtgctggtgcgggatgatggcgagatcacggtttctggattcgagcgtctcacggatatgaaagaataacagccatgtctactacgcaaacttcctcttctcatggcaaactgatcgtggctgtcattgccgccgctttggtggtcgtgctcgccttggtgtccgctttcatctggcccggctgggctctgaacaagggcgatgaagcgtccactcagggcaccaccacctcgcagggcgcgtcgcaggatgcctctgagccgaccacgccgtccattgacgctgtggcgttgccggatgacgccagcgaactgttgaaggccatgcctgattccgtgttgaatttcgcgcgcaccaaggccgatgccagcacttcgtggagcggcgcttccccggtcgaggagtacacgttgacgtattccacgggcaaggacggtcaggatatcaccttgaaagtggcgcaatggtctcagtctgatgatgcgcaaagtcagtatgacaatctgaccggtgccatgaccggcaaggagctgggcggcggcaatgtgaaggtttccggtgaagcgaccggcgcctatagcgccaaaaccgatccggacgacgaaaccaaggccatcgcggtctggcgcaacgataccgtggtgttccaagccacgggagccaaggattcggtgcagcgcttctaccagcagttcccgctgtgatactgcctacggctggttgtgcgatcctatgattcatgcatgattcacgtaagattcagccgtggaccatgcggactgcgtttgcctgatcttccgataaaaaggtgcgtgcttccaccatatgaatgcggttgtgtgcgttagtccccgaagcagtgtagtattgggcaagttgcaaacttttaccctttgagtttaagaacggaggctgagatgggctcggtcatcaagaagcgccgcaagcgcatgagcaagaagaagcaccgcaaactgcttcgtaagactcgccaccagcgcaagtagtcttcaggcgcggttgaagcgtcgcttaaacaaaatcccgtatgtcttcttgaggtatgcgggatttttgcatattgcaaagaaataaacgaaaagtacgagaatcggaaatcaatagatgcaaaaagaaggctgtgcgttcgaagttgaacgcacagcctcatatggtttcgtgtaggttcgcgaaaatccgcggaaaatgcggaacttacgctacttcaaactcacttgttggagttggtgagcacgcgcggaccgttgggatcgcccacgatgacctggtccaccatgtgcaggaacaggccatgctccaccacgccaacggtgttgatgagatcgtcggccagagcctccgggtgttcgatgcattcgaggtgcagatcgaccacgtagttgttctcgtcggtgcgcaccggctggccttcggcgtcgaggcgaagcaccggcttgtagccgcgggattcgaacttcttgacgacctggcctgcgccgaacggaatcacctcaaccggcagcgggaacttgccgatggtgtccacaaccttggactcgtccacgatccacacgatcttgttggagttggtggccacgatcttctcccacagcagagcggcgccgccgcccttgatgccgttgaagttcttgtcgacctcgtcggcgccgtcgatggtcacgtcgatgtgatcaacgtcatcgatgtcgacgatcttgatgccgtagccttctgcctgctcctgagtgcggcgggaggtggtcacgccggtgaactccaagccttcctcctgcacgcggcggccgagctcgtcgaccaggaagcgcacggtcgagccggtgcccagacctgcgatcatgccgttctgaatcagcttggcagcttcgatgccggctgccttcttcaatgcgtcctgctgtgccttgtccatgatcctccttcgatatggggttaagaccgtctccatattatcggatgtgttgatttttgtgcgtttgcggacatgtcatgaacgaaggtgtgccattggtggtcagcaaatgttttcacaggatgtttcacgcactttcgaggcgttaaggtcgaaagtgctggctcgttagttgtgcttgactgcaaatggcgcttcgtcgaggacgagcgtgccgtcgccttgcacgtagccttccaccgcgatgtaaccgcggatcaggcgtggcttgccgtcgaacgtcggactggaatttggcgggggagtgaagcgaatggcgcccgacaccgccaatcccgaaggactggcgcgatgcggcagtttcggcaagtcggcgacggcgttcgttggcgccgacgcgtttgcggattcggctgattcgctcgttggcgccggcgtgttttccgaggaattcgcggattgttcgttctgtgcatcgtcggctggctgccgctcgtcatgctcgtggggaaaacagtccggcttgagcagcatttcggcatacgatttgcgcggtgcctcggcgtcaggcgtcgtgccatcaggcatggtcgtatcaagcgcggtggtcggttccggcatgtcgtcggattccaccgacatttcgttggacgtcaacggcaatgtcgcctcgtcgggcgctggatagccttccggctccaccagcatatcggcgatggaacgcggacgcggctccggatcggccgcgcccatcagatcatcggccaacgatccttgagcggacttgccttgcccgcgccccatatggtattcgtccgtagtgattttgccgtcaagcagcatttgggcatcatcgggaacatcggtaccttgcgaatattcggaagccagcagcgactgccaaccctccaaaggaagatatccttcacggatcttcgaacggcaatcgcccgcataggtgcgcgccagctcgtccaccttctcattgccggcattgccggcatgacccttgacccatacgaatttcaccggtccggggcgcttggagatttcggcatcgatcgcgcgaatcagatccgcgttctttaccggcttcttttgcgagttcttccagccgttcttcttccagccgtgaacccacgtggtggaacagttgatcgcatactgcgaatcggtttcgatcaccaacggttcggagccggggtgcgcgcgcaacgcctccagcaccgcgcacagctcgccaatctgattggtgccgttcgtagctccgccggcatcgcagtcgctgtcatggtgatgccccggcttgccgcctgtggcaagctcatgatcggcccaaccccaacccatcggaccattcggattgcctaaagcggaaccgtctgtagaaaccgtaatcgtcatatctctaccctacgaaagccgtgagactctgccatacgtggtgaactgcgaactgtgatcgggcgacgtcgaacgggaatctcaatcatccaaacacagcatgacggaagcgcggaacagcgtgccgtcataatcgaacgaggtcgcgccatgatgccgttccgcggtttcgcgcacggtggcggtgcccaaaccttcacccccatgcttggttgaggcgaaagcgtcgccaacctgcataatggaggaatcgtgcgtgttgtcgaccacaatgaacagtgatgcgggcggcccagtgcgatatttgatgcgcaccctgagttttttctccccatcctgttgtttcataatggcctcagacgcattttccagtagattgccgaccatggaacataattcggcattattgatgttgagatattgcggcaccgacgctttgacgtcgacttcagcccctatatggcggatccagtcacagtagtagaccagcaccgcgttcaacgaagcatgttcgcaatactgcatggggatgggctgcaacagcctatgattggccatctcctccaaatacgaggtgatgccaggcatatcgtcggccgcggcgagagcctgcaacgtctgaatatgatgccggatattgtgcttgatctgcctcgcttcgttgatgcgttcgttcatatgctgcagctgcaaggtctgcatggcttcgtaatgttcgcgtttgctggcttcgcgcagtcggtccgcctgctggatcatataccagatgaggaagtaggccatggtcatgaaaccggaatatgcgatggatacggtgaaggcgatgctaagcacgcgggtgtcgagcagcgatgcgttgtcggcgggcatgcaccacaccacaattgctgtggaaatgaacggaaaaagccagatgaccctccaaaaattcctgctgatggaaggtgaatcgaatgttgcggaaaatgaatgatggaacggatggaaaagtgtagtcgccgcaatcaaatcaaaaatcagcagactgatcattcccggccatccgacacgtaaattcatggactgctcattcagaacagctaaatccacggccaaagacaggtaataaatgatcgcgacgatatatgcgactgttgaaacgacgaaaagaagctgcccccaaggaagattcgtcatcttacgtaaagccaataccacaaccggagccgaaggaatcacggaccagagcgaggggacgtggtcgaggcaacatgcgatgccgcacaggaagaagacaatcacgccggaaatcatgagaataaggccgtcgcgcttgggattctccatatgatgccaggtcatgtacaggcagagaagcaggcccgttagcgcgtttagctgctcgccgatggcgaagaacatgcatgatggcgcgatcgatgcgagtgcgtcaagcatggctagtcctccattctcatgcgggtgaacgtgtattccgcgtattttctgcaggtggtggtcaccgcggttttcgtgatgggaatgtgcttgccgcctttcatcacgaattcattgctgctgatgcctgacacgtagtcgaagttgacgagcactcctcgcgcggtgcggtagaagttgctgaatacggtgagacgatgttccacatcggagaagttggtgcggattttcgcgcaggtgccgtcggcgaaggtgaattccacataatgcgcgctggaaagcgcgtaggcgataaggcgacggtccatggtgatggcgggattgccgaacgccacctgccatgcggcgtccgtgctgctttgtgcattgcccgtcgattgatgttttttcagatgagtgaccggtgttttcgtgtcgagctgcgctgcgacgcggtccatggtcgcatggaacgcgtcgtgattcaggggcttcaacagatatccgcttgcctgcacctcgtagccgagcacggcgaaatcagtgcttgacgtgatgaacacgatcgggcaatcgtcgttttgtctgcgcagcgtccgtgcgatatcaagtccggtcgccgcatgcgtggcggtttcgtcgtccgacagatagcagtcgagcagcagcaggtcgtatcgggcgtctttccagctttcgatgaaggattccgcatcggcgaaggtcacgcattccacgccgatatcgcgggtacgtttgaaatattccgcgcacatgacggccatcagttggcgttcggcggcgtggtcttcgacgatggcgatgcgcatcgttcacctcccatgaagattggcggggaccgctggactgagtgttgtgtcgctatcattcaagcgtaatgcgaagcggggccggcaggagggtgatagcgtgcgtgtcatgccagaattcggcgtttcgtgccatatcgcacgattcgtgttcgttgcgattcgtattcgggcggatatgcgagaagcccgcctttttcaggaaagcgggcttctcagtgagtttgcgaatgattggcgaatggctggattacgccgattcgccaatgatcactcggccaaggccgtgtccacgacttcggtggcttcggcgagcaccttgtcgagggcttcgggggattcgaaggactcggcgtacaccttgtagatgttctcggtgccggaaggacgggccgcgaaccagttgttctcggtggtgaccttcaggccgccgatcttggcgtggttgccgggggcttcggtgagcttggcggtgatgtcctcgccggccagctgggtggccgcgacgtcgtcgccggaaagcttggcgaacttctgcttctgctccaaggtggtcggcgtgtcgactcgcttgtaccagctttcgccaaagcgatcgacctgctcctgatgcagctgggccgggttcttgccggtcttggcggtgatttccgcagccagcaggtcagggatcagaccatccttatcggtggtccacacgcggccgtccttgcgcaggaagctcatgccggagctctcttcgccgccgaaggcgacttcgcccttgaacagcgggtcaacgaaccacttgaagccgaccggaacctcaacgagcttggcgtcgatggaagcggccacgcggtcgatcagggaggaggacaccagcgtcttgccgatgccggcgccttccggccagcccgggcggttgccgccgaacaggtactctacgcacacggcgatgtagtggttcgggttcatcacgccccagttcgggcatacgatgccgtgacggtcggcgtccggatcggtgccgccgaccaggtcgtacttgtcccaagcgccgttgttgagggagtccacaagacccttcatggcgtacggggagctcggatccatgcggatcttgccatcatggtcgatggtcatgaagctccaggtcggatcgacctgcgggcgcaccacgtcgatggtcaggttgaacttctcgttcatcagcggccagtagttgacggaagcgccgccgagcgggtcgatgcccaggcgcacgccggaggaacggatcacatcgaagtcgatgacgttctccagatcggcgacatagtgctcgcggaagtcaaagcgctcgaccaggtcggacttgacggcctgctcgaacggaacgcgcttgatgttcttgaaatcgccgagcagctcgttggcacgatccgcgatggcgttggtgacgtcggacggagccgggccgccggtgaccgggtcatacttgaagccgccatcggtcggcgggttgtgcgacggggtcaccacgatgccgtcggccaggccttcgccggtgaagcgctgggtgccatccgctgcgcggttgtgggtcaggatggcctgggacacaaccggggtcggggtgaagtcgtcgcgggaatcgatgcgcacggtcacgccgttggcgacgagcacttcgatggcggtcttccaagccggctcggacagagcatgagtgtcgcggccgatgtacagcgggccggtcacgccggccttcttgcggtattcggcgatggcctgggtgatggcgacgatatgggcctcgttgaacgaggtcttcagagacgatccgcggtggccggaggtgccgaaggagacacgctgttccggaacgttggggtcggggacgacgtcatagtacttgccgatgacctcgtcgacattgatcagatctgctggggtagcgggcattcccgcattgtttgcaaccatggtcactattctgccacgcttttgcgtcagatgtgcgtaattgtcccattatgcgcgatgaatacgttgtctgtttagtgcatgttcggatgtgtgtacatgaattttcgaaaatggcggattctgcgcttagccgagttgcgcaatgtcaaacgatggtgtatagttctatgctattcgactgatgcagggttgctagtcaacataaagacgcaagacctgagatgtggctgaactatagccatatctcaggtctttttttgttgcccgaagcggtgttgctcggatcgaatcggttgtaagggaaagaaaggaaatcaggatggctgactcactcgcatcgcagatcatcactgcaatcggtggtcctgaaaacgttcgcagtctgacgcattgcgccactcgactgcgctttgaactggttgacgcatccaaggtcgatcagaatagtctcgagcacatgcagggcgtgctcggcgcggtgccgcagagcggcgaccgcttccaggtggtcatcggcggtggcgttgccaccgtgtacgaaaacatcatgcatctgcccgaaatggccggtgtcggcggtgcctccgcatccgacgatggtcagaagagcaatgccgacgtcaaggccgaagcccgttccaaggcccgcggcaaggtggcttggctggactccttcttcgagtatctctccgattccttccgcccgattctgggcgtgctgctcggcgcttccatcatcatcgcgctggtcaacctgcttatttcgctgaacgtcattccgaatgacgaggtttccgcaggctgggtattcgtgaaagccatctggaagggcgtattctacttcctgccgatcatggtcgcctacaacgcgtccaagaagctcaaagtcgacccatggctgggtggtgccatcatggccatgctcatgaccccgcagttcaccggcttgatggacgccaagaccaccacgtgcgtggagaacgccgctctgggcaccaagtcttgcatggccaacatattcggtctgccgatggcattgagcgactattccggcaacgtgttcgtgccgctgctcatggccgccgtgcttgctctcgtctaccacggattgaagagggtcatcccggaaagcgtccagctggtcttcgtgccgttcttctgcatgatcatcgttggcgcgctgaccgccttcatcatcggcccgatcggcgtgtgggtcggcaacggcctcggcgtcggcttggcctggatgaacacccatgccccgttcatcttcgccatcatcattccgatgctgtacccgttcctcgtgccgctcggtttgcactggccgctcaacgccctgatgctcatgaacattcagactctcggctacgacttcatccaaggcccgatgggcgtgtggaacttcgcctgcttcggcgctaccgctggcgtgctcttccttgctgtgcgtgacaaggataaggacatgcgccagaccgctttgggcgcacttgcggccggcctgctcggtggcgtttccgaaccgtctctgtacggcattcacctgcgttacaagctcatctacaagcgcatgctggtgggctgcggtctcggtggcgtcgtcatcgccatcctcggttggctcttcccgtccgtcaccgccgccggccagaccgtgcatggcgtgaccaccaccgctttcgcattcacctcgttgctgaccattccggtcttcaatcagatgtgggtgtatgcagtgtccatcgccgtgtccttcctcacctccttcctgctgatcatcaccttcgactaccgcactccggaacagaaggccgaagtgctggcccgcgcggctgccaatcagaagaccgctgtctcgtcggtcgaagccaagggagtcgctccggctgctgccaccgcgactaccactgttgccgccaccaagactgaagccccggctgctgccgccaccaccgtggtgaacgctccagtcgcaggccatgtgatttccctggatgaaaccggcgatccggtgttcgcgtcccgcgcactaggcgaaggcgtcggcatccagccggcagacagcaccgtcgtcgcgccggtatccggcgtgctgcagaccgtcgccgaaaccggtcacgcattcggcatcaaaaccgatgatggcgtggaagtgctcgtgcacgtcggcatcgacacggtgaagatgaacggcgaaggcttcgatgtgaaggtcaaggccaacgaacacgtgaacgcgggggacaacctcgttgtcgtcgactttgataaggttaaggaagctggatacagcaccaccacattgatgacggtgctgaacacagtggccttcgcgtccgtcacgccaaagaccggcgtcgacgtcaaggccggtgagtcggtgatcgacattcagcgctgaccaatcgcatagtcggaaggggccgacgtggacgttcttcgcgtattcaacaataatgtcgtactggcaaaagacggcaacagtgaggtgattctcaccggtcgaggtataggtttccaagccaagcccggccagcatgttgacgacgcgaagatcgtccgtcggttcgttcccgcagatggcaaggatcccgaccatatggcccaacaggtggccgggattccgcccgaaatcattcgtctcgttacggacgccatgaaccgcaccggtctgaaggaacaggccgacagacagcctgcattggtgctggcattatccgaccatatttgcggtgcgatccgccgatcgcaaaacaagcagaccatcgaatatccgctggaagccgaagtgcgttcgctctacgcgagcgaatatgccaaaggcaaagctctggtcgatgccatgaacacgtatctgggcggtgcgctgccggattgcgaagccgtggctttggccctgcacttggtcaatgcgggcttctctaccggcgatctttccgccacatacaccatgaccggcgtcatccagcaaatgctgacggtcatcgaaggctattacggcatcactctcgaccagaacagcgtcaatgtggcgcgtttcatcacgcatctgcgctatcttttcgtgcgcatccaccaacatgaacagcttgatgacgagcctgaaccaatcgtggaatccatcaaaacctcatatccgaaagcatcggattgtgcgaacaaacttgcgatcatcgtcaaaatgcgattgaacgtgagtctttcggaagcggaaatcgcctatctcaccttgcatgtcgcacgagtgacttctcatgcgacggaatcgcatgagaatgacgataccaatgcataatttgcataaaatacataatcatcgtaataaataatttaataattacgataatagttactgatttacattggaagtattggcttcgggcgcttccggcacacgcacgcacaacgacttacgctccacactgaaacgaatatgctgcgtttcgggaagcatatcgccgtcaacctgcgccaaaacgggtttctccaacttgatttccgcgctgacgccctgaatctggtcaaccgtggaattcgtggacagcggactctgctgggccttgccggtgatcgtctgatgcagcacatcgccgaacagattcgcccaaccgatcaaaccgccggatgtgtcaatgatctcgtaatcgagaatgccgtcatcgtacacggcgtcgggcatgagcgaaaataccggaatctggccgcaattgccggccatgaacgtgcggaaggtcaatccgtgcgtggtgtgcgtgctgccgtcggcgctggtaatggtcacatcacccttgtacttcggggcgaacaggttcttcacgcccgacacgaaataggcgagccagctgatgttcttcttcaactcaggatcggtgtcgtcgatcatcaccgcatcaaagccgatgcccgcgataataaggaacgcatggccgtgatcggcggcttcatcatcgagcagcgtcagtcggccgacatccaccaaacgcgaaccatgagatgtggcgacggtcagcgccgcatcgatatcatccacaggaatgcccatattgcgggcaaacagattgccggtgccaatagggatgatgcccagcgcgtggccggttcccgaaagtgcgctcgccaccgtgcgcaccgtgccgtcgccgccgaccgcgaccaccacgtcggcgccatgctccaaggcttccagcgcgcaggcgcgaccatccttatcaagctgcgttccgatatattcaacctgcgtgagatgcttcgcctcgcagaactcctgaatatgctgcttgcgttgttccgcctgcggtttcgaaggattgatcacaaacgcgtaatgcacctgatcatcgtcgcgcttgtcgagctgttccgcaagtttgcgatgcttatacgcgcgtactgcgaaaaaggcggccgcgcacaccgctgcgaccgcaagaacgacaatcagaatgataacaggcataggcatgtcatctattgttcacggaagatgcgaaaaaagcgaatcaagactgatttattcgacgattcctgcacgttgtatacaaaaatgagaggactgcggcgggtgtcggctttcagcactaggctaggaggcatgcttgatatccaattcattcgtgaacatgctgacgttgttaaggaatcccagcgcaagcgtggcgaatcggtcgaactggtcgacgaggtgctgcgctccgacgaggttcgtcgttcctctctgaaggaattcgaggctgcccgtgcgcagcagaaggaaatcggcaagaaggtcgccgcggctccggccggcgaaaaggccaagctgattgccgaaaccaaggaactctcccagaaggtttccgaatacaaggccgcagcggacgccgcagccgaagaatacaccaccgccatgtggaagctctccaacgtggttgagccggaagctccggaaggtggcgaagacgattacgtggtggtcaagaaggttggacagatccgcgatttcgcagccgaaggtttcgagccgaaggatcacctgaccctcggtcgtggcgttgccggcatcgatatggaacgtggcgtgaaggtcggcggttcccgcttctacttcctgcgcggccaggtggcacgtatgcagatcgccatgctcaccatggctgtggaccaggccgaagagcacggcttcacgctggccatcaccccgacgctggtgcgtccggaagtgatgcgcggcactggcttcctcaactcccacgccgacgaaatctaccgtctgcgcgaacctgacgagcagtacttggtcggtacttccgaagtggcgctcgccggcatgcacgagaacgagattctcgacctgtctgacggtccgctgcgttactgcggttggagctcctgctaccgccgtgaggctggcgcagctggcaaggatacttccggcatcatccgcgtgcaccagttcgacaaggtggaaatgttcgtttacaccaagcaggaggactcctacaaggagcatgagcacctgctggccatggagcaggaaatgctcggcaaagtcgaggtgccgtaccgcatcatcgataccgctgccggcgatctgggctcttccgcagcccgcaagttcgactgcgaggcttgggtgccgacccagggtcgctaccgtgagctgacctccacttccaactgcaccgaatatcaggctcgccgtctgaacattcgcgaacgtatggaagatggtggcacccgcgccgtttccacgctgaacggtacgctggccaccacccgttggctggttgccattcttgagaaccatcagcagaaggacggctccatcgtcattccgcaggccatgcgtgcctacatgggtggcaaggaagtcatcgagccgaccaagtgggaagcctgatagagtttgggtttgcctggcagagtctgatagcttgggttgctcgtggagtttggtaactcgggtttgtttatcggttccactgagttgctgagctactaaactgctgaaacggacttctgcaatacgaaatatggaagtctgaggatgcctggcatttggcatttgccgatttctggcttttctggcttatgggaagggactcgcggtgagcgggtcccctcttttttgttttcgccgcgttctttcctttgtccttgctcgctttcttcccctcgttctttgggttgtgctatattagcgtttcgtgcgtgatgcacatgggtaggtgtctgagcggtctaaagagacggtcttgaaaaccgttgaggtgcaagcctccgcgagttcgaatctcgccttacccgcctatcaggcttactgagagcgctctaagcgcccggtaagccttttttgttgctgcaatccgggtaaactccacccaagttcggctcagcaccgtccaagtctcaattcttccatccactggaacaatcttcccgctgttggccctgtgagcgtccagattcttccagtgggtggaggatttgggtcgctgggatggtctgtggcggggtgattcttccagtgactgggggatttttcccgctggggggcttgtgggcgtctgtttttctccagtgggtggaggatttgggtcgttgagaggcttgtaaatgtccactttcttccagtgactggaaggattggggagggattgtgatgttgttcggtgtacgatcaggctgagttgtgagaaaggctgctgtgactatgcgtgagaatgggatgcaaatgaaggaacgagcgatgggagctatggctgggcttgcgttgggcgatgcgtggggaatgcctacgcaaagcatgtcggacaagcagattcgccggtattacgacggtccgatcacgaaacttatgagtgccgtgccgcagcagccgatcgcaccgaatatgaaagctggtgccgtcaccgacgatacagaacaggctttcgtactcgcacggcgacttatcgacgataacggctgcattgataacacccgatacgcccacgatctgctgcaatgggaagctgcgatgaaggccaagggatcgcttgacctgctgggaccttccaccaaagcagcgctgcaaaaacttaccgaaggcgtaagtctggaagagaccggccgattcggcaccaccaacggcggtgcaatgcgtgccacgccggtgggcatcgcattccgtccaggccaagcgctcgccgacgccgcctggcgatcctgtgtggtgacgcataacacggtgcagggcattgaagcgaccactttggtggctgcggcggtgagctttgccattgaaggagaacgtgactttttgcacctcgcggtggaattcgtacggaagcttccacagcgtggcaattggtcggcaaaggcttcggtgcttgcgcgtgtgcaatatttcatgaattgggccgaaactgatggatgcaggctcaatgacaacgaattcgctgctgtgctgcaacggaattgcggtaccagcgtggaatcgaacgagtccgtggccgccgctttcgccattgcggcgcgcttttttgacgatcccacgcatgctttgtgtttcgcggcttctatcggtggcgacactgacaccattgcggctattgcgggcgcgatgctgggggcgtggcatggtatgcaaggtttcgacaaaaccatgcttgatcaggtgctttcacaacttgctgaagataatcaccttgatttggtcggcactgttacgtcgctacgcgcgttacgcgatgatagtgcgcttaatgatgtaaatatcgtttgatctgcaggaaccgtagttagcgaaactatgacggaagtgcgaaaggcatcgcaatgactggaaaagttatttctcttgggcaggttattgtcgatctgaccatgaatgtggacgcggtgccgcgtgcgggtgaagatgtgttcgccggcaatgtgcaaacgcaggttggtgccagcttcaacacgctgtatgccgtgcgccgcatgggcgttaaggcgtctcatgctggtgtgattggtacggggccgtgggcttcgcagattctgcaaacgttggaaaatcaggaaattcagcatatcggcaagcgggatgccgtgcacgattcgggattttgcgtggcgttgaccgacgcgaatgctgaacggacgttcatttcgacgaggggcgcagaagcgtacggcagtgccgatgcgttcgattctgtgaatccagaaaagcgggatgtcgtgcatgtgagcggatacacgttggtgcatcacactgcggacgcgctgcttgcttttgtgaaaagaacgactgaacatcgtgagttcactgcggtattcgatccttctccgatgatctcggcagttgatgatgacgttttccgtgtgatgctcgcatatcgtccgatatggtcgtgcaatgaacgcgaggcaacgttgattgcgcaacgtttggcggcgctcgatagtggcgattcttgcgattgcaaggtttcgcgggatatgctgcaagagattgagagcgcgaatgtcaatgaggagacggttgcgtggctgtgcgatcgattgcaatctcctgtaatcgttcgcgtgggcgcggatggtgcgtggtcggcgattcccggtgacgaagtgctgcgaattccaggttttccaatgaaagcggtggataccaatggcgctggtgattgtcacgcgggtgtgttgtgcgccctgctgtgcgaaggcgtgccgttggaggaggctgtacgttgcgccaatgctgcttcggcgttgtctgtaacgcgatcagggccggctacctgccctgatcgaaaggaggttgagcggctcctaggaagggcgttctaagacttatggtacaaatgactataagtggttatatcatgtgcacgattgcgctgacgcggcgtgcatgtcgcttgcccgcggcgttgctcggcagattcaaggagattagtttcacatgagcaatgagaaagggaccctctccatcgaggagcagggtatcgacaccatatccgaagaggagcgtaagggcacgccggccagtctgttttggccctggttcgctgccaatgtttccatgttcgccatgtcgtacggcgcgtgggcgctcggtttcggcatttcgttctggcaggccaccgccatgaccattattggcgtggtcatctcgttcctgctggtcggcatcatttccatcgcgggcaaacgcggcaacgcgcccaccatggtgctcacccgcgccacgttcggcgtggaaggtgccaaagtgccagcggctctgagctggatcgccacattaggctgggagatttcactgaccaccaccgctgtgttggcattatcaagcaccatcgaaaaactcggttggggctctggtgtcgcgcccaagatcatctccaccattgtggtggtcggccttgtggtggtcgcaggtattttcggatacgacctgattatgcgttgtcagcaggtcatcaccatcgtgaccggtgtgatcaccgtcggtttctttatcctcggctggggacatattgacttttccgccattgactcggttccggcgggatcattgccggccatgctcggctgctgcttcttcgtgatgaccggctttggcttgggctgggtgaatatcgctgccgattactcgcgctatctgccgcgcaactcctccaatggcggcattgtgttctggaccacattcggtgcgtccattgccaatgtgttcctgattttctacggtctgctgctcgcggtttccaatgccgacatggcggaaaacgttggaaatgatccgattggagccatggcttccattctgccgacctggtacttgattccgtacaccattgtggccgtgctcggtttgatgtccggctccattatggacaattattccaacgggcttgcgctgctgtcgttcggtgtgaagttgccgcgtaccgtggctgccgcgctcaccgccgctttgactgtgcttggtgtggtctacgtgactttcttctccgacacgttcattggcccgttccaaggctttctgaccacgctcggcgtgccgatggccgtatgggccggcatgttcgtggccgatgtgatcattcgcaagaaggattacagcaccgctgatttgtatgatccgaaggggcgttacggtgcgtggaacggtaagtctttcgccattcttgtcgtcggtaccgtgcttggttggggattggtggtcaacactgccgccagctggctgaactggcaggggtatctgctgttccttatcggtggcaaagaaggtagttgggctgccgccaatcttggtgtgattgttgcgctgattattggtcttgcgggatcgttgatgttccagcgtggcgatattgccaagcaggaagctgatctgccggtttcggaagcatgagttgcttattgcgataatacaagaaaaggaaaagtcatgattgcggaagatgaatggctggtagttatcgacaggcagcgtgtttttgcggaaagtgaatggtccgcatgggcttgcccggacggctcctatcacactactgatgaagcgttcgcacgattggctaaggcgttcggcgatcgtgtggtctatacgcgatatgttgcgcctgagccaccgcaaaacgcttgggttgattatttcaaagattggccgcagtttttggttgctcccgacgatccgatgtacgatctcaccgcggataccgcggaattggcgcaaggccatgccgtggtcagttgcgacactttcggcaagtggggaagcgtgctgagcgaagccattaaaggcgctaaaaagatcacggtatgtggtgtcgccaccgattgctgtgtgcttaccactgtgctcgccgcggctgacaatggtgtagcggtacgcgttgctgctgacgcttgtgcaggcagttcgccagaaaaccatcagatggcattgagcaccatggcattgttcacgccgctggtcaccgtcactgatactgattccatcgtaggataggtaaggactttgattctgcggggtttgttgagttctgctcagcaaaccccgcttttttgtatgtcgtgcatattgcgccaaaacttggatgatgctcggctggcatcggtaatgagccattaatcttgcggtgcgcttttgtaactgcggcgtaacagtgcggtggtgattgtaacggacgattccggcacaatcgtgggtatcgacagtttcgtgaagaggttttactgacggacatgtctctcacaggaaaaatcccatgtatgaatcgaggccaccatggcacagcagatcactcgcttgcttgacgatcctacgcaagcggtcagtctagacactttcagtgggctcaccaaaggatgccccgcaccattctggcttttccaaggcgtttgcgcggcttggggcatcgaccaccagcgggcgcaactcaacctcatcaccgtatccgagaacgcgacgttcctgctgttgctggacggcgagccccaaggcgtggtacgtgtctcgcagccgggctatgtgggaggtcccgaggcggtggcgtcggaaatcagctggttgaatgcgttgcatgatatcgaaggtatcagcctgatcaatccggttcccaccatccgtggcacgttcgtaacgaaaatcactgatctgaacggtgtcggctggacggtgatctccacgaaatatgtggaaggaaccgtgctggaagatcttgagaatcctgcaccgtattacgagacgatcggtgaatgggctgcgaaattccatgagcagtcgcgcacgtggagcaaaccgtacggtttcacccgcttcaattgggatctttcgaacatggttggtccggcaccgcgttggggacgttgggaaaacgccaatctcaccgacgaagagaagcagctgtgcgacaccgcgctgtggaaggccatggacgtggtgatgaaagtgccgagaaccaacgaaacttgggggcttatccatgccgacttgcgcccgtcgaacgtgattcgcggcaatgacgggagactgaccgtcatcgatttcgacgatgccggatacagctggtatctctacgattacgcttcatcgctgagtttcatcgaacatgaaccgtatgctcccgatcttgccaaggcgtgggtcaagggataccagcgcgtcgcaggttcgttcacggatgaggaactgcgtatcatgtccgcgctttccatgatccgacgcatgcagatgctcggctggaccaccagccaccgtgaggatgccctgcccgacggtctcgctgcacagcaggctcccggcagcgtgatgtgcgcaaaaaactatcttgaggatccgctctggctgctgcattaggcaagttgcatgaaacaagcgtaattacgcagaaaccagaaaatccaagaaatccaatcgtaagcacgtaaaaatacgcaattacgaaaatctcaatttttataacttaacaacatctgaccgcaaccaaccaaacgaggaatcaatggcataactcgccgaacaataagagaggaaggcgattacaatgactgcgtcaactgtttcgggacgatcgataggcggcgtgacctacgttgaaaccgacaaggactatttcgcaaaacgacagcttaagcgaaccgcgggagcgttcggtctatgggccatcggcatttccgcggtgatctccggcgacttctccggctggaacggaggcatcgcccaagccggatggggtggcatgctggtggccgccatcgtggtgtacctcatgtacgtgcttatgctcaactccatcagcgaaatggcgtcggccatgccgcacacgggtggcgcgtattccttcgcgcgtgccgccatgggtccgtggggcggcttcttcaccggccttgcggaaaccatcgagtatgtgatgaccgcagccaccatcgtctacttctcgtcggcatacgctgatgcgatcctgtcgaacctgaccggatattcgcttgacgatcatggcttggcttgggtttggtggcttgccttgtatgcgattttcgtagtggtcaattggctgggcgccgaaacgtcgttccgtttcgccgaagtcgtgtcgatcgccgcgctcgccatcgtcgcactgttcggtatcggcgctttcgccactggtaaggccgatttctccacgctgctcaatatcacgcctaccgaaggcaactccgcgttcctgccgttcggcccaggtgccatcttctacgccatgccgttcgccatgtggttgttccttggtattgagcagctgcctctggctgcagaggaagtgcgtgagccggaaaagaacattccgaagtcgtcccgcctgtgcattttcacgctgggattgtccgcgctgatcatcgtgttcctgaacccggctgtggtcggttccgaagcgctcgctggttccgatgagccgttgctggatggctatcgtgcgattctgccgggcaatctcgccgcggtgctgtccgcattcgcattgatcggtctgctcgcttccatccaaggcattatgttcgcgtatggccgcaacctgtattcactgtcccgtgcaggctattatccggcgttcctgtcgctgaccggtaagaagaagacgccgtactggggtctggtcgtcggcgcgatcatcggtttcgcagccctgttcatcatcgcgtacggcggtgatggcgccggttcggtggtgttgaacatcgctgtgtggggtgcggtgctggcatatctgctgcagatggtttcctatgtgatcctcaggaagaagatgcctgatatcaagcgtccgttcaccagcccgttcggcgtgccgggcgcggtaatcgcaggtttgcttgcattctgcattttcgttgccgtgctgctgaacccggattatcgactggccgtctacgccatggtggtcatctacgttctcgcgaccatcttcttcgcggtttacggacgtaagcacctggtgctttctccggaagaagagttcgccgcttccggcggaaaggtcgcatataagactgaagactgactgattttctgcgattatcgtttcgttttcttgaaataaaacgatattgccaaggccgtgttcatctgggatgcggcctttttcaatcatcggaaatatgtaaaaaggtcaaccaaataggtggaaaacagcggaaatggtttgtttctgcgctgtatcagccactcaacattactgcgttaccgtgtgggtaacgccacaggaagccaacgaaagaaggaatcatggcaactcgatcaaccatcatggacaccaatagcttccgtccggaaatggcggccgcgctcgacccagaaacacgcaaactaaccgaagagcgtgacgtgcttggtccggcctaccgtttgttctaccgcaatccagtgcatctggtgaagggccgtggctcgcatctttgggatgccgacggcgaggaatacttggacgtgtacaacaatgtcgcatccgtcggccactgtcacccgcgcgtggtggatgcacttatccagcaggcttcgatgctcaacacccacacgcgctacctgcatgagaacatcctgcattatgcggaagatatcctctccaccatgcctgacgaacttgaccgcatcatgttccagtgcactggttccgaagccaacgatctggccattcgcgtagcacagacctacactggcggcgaaggcgtgatcgtgaccagcgaggcctaccatggcaattcggcactcacctccaagctttccccagcgctcggcaccgcgcaaacgcttggcttgaccatgcgcatgattcccacgccggacacttaccgcttggtcattgacggcaagcctgccgcggaatgcgccgccgaggaattcggcaactggatggctggcgaagtgcgcaaggccgttgccgatatggaacgtcatggcatcaagtttgcggcattgcttgccgactccatcttctcctccgacggcgtgtaccccgatccggtcggctatctgaagccggtgatcgacgccgttcatgaactgggtggcgtatggatcgccgacgaagtgcagccgggcttcactcgcaccggcgacgcattctggggattcggacgccaaggcattgttcctgatctggtcacatccggcaagcccatggccaacggtctgcccacgtcgatgatggccgcccgccacgaagtacttgaaccgttcgcaggctccattccttacttcaacactttcggcggcaacccggtatgcatggccgcgtcccaggcggtgcttgacgtgatgcgtgacgaagacaccatgagcaacgccaagaaggtcggcgcaatattcaaggatgccgtcgcgtcgcttatgccggcacacccctgcatcggcgacgtgcgtggcgcgggcctgtacatcggctgcgaaatcgtcaagccgggcaccaaggatcccgaccagcaggcagcgctcgatatcctcgaaaccctgcgtgacaaccacatcctcacctccgtatgcggccgttacggcaatatcctcaagctgcgcccgccgctggtgttcagcgaatccgatgtggattggttcatggatggattcatgaagactctggaaacattgaagctgtaaaacgacagataaccataaagaaagggcgcggatatggaagatcataccggcatcaggcgcacgcgaagcgctacgagcgaactggtctaccgtatccgcgctcgcattcgtgaacaggagcttcttcccggagagaaactcggatcggaacgggcgctcgccgacagtcttggcgtcagccgttccgatttgcgcaatgcgttgaccgtgttggaatccgatcatgaaatcatccgcaaaatcgggcgtgccggaggcatcgtcatatcggacggacgtttggaacgcaatatcaacacggtggaatcattgccgacgatcgcgcgaagacaaggcatgcgcgtttcgtcgaaagtattgcaggcggtgattgccccggcttccgtttccgacgtgcgtttgctgcgattaccgggcgagcatccgatgatctacgacattacgcgattgcggtatatcgaaaatcggccgctttcgttggaacggtcgcatttgccggcatatctgtttcctctgttccttacacgcgatttgacgaccccgttctacaccatgttcgaacgtgattatggcgtgtatccgtgcaatgtcgacgaaacattggaatcggtggtcggcgacgagcaagagaacgagctgctgcagatcgaggcgggaactccgctgatgcgcattcaccggatcgcctatgcgtcggatggatgcccgttcgagcgtgccactgacgtgtatatcgctgatcgcatgcgattcaccatgcatcattccggctatgtacgcctgtccgcaacgtctacgcagaatatgacgaaataagccggaagattcttcggttatacgatgcggcggtcggcggcccagcgggtgagttcggtgcggtttgacagctgcagtttgcgtagtacggagctgacgtgcgtttccacggttttgatggaaataaacagttccgcagccacttccttgtacgtgtagccgcgcgcgatcaagcgcatgacttcctgctcacggttcgacaagcggtccagctcgtcatcgtggatcggtccgcttgcagagccgcccatgccagccggtgagccattttggaaagcggacagcacgaatcccgccaatttcggcgaaaacacggcatagccctcatgcacttgcttgatggaagaaatcaaatcatcgccggaaatcgtctttgtcacatagccttgcgctccggcacgaatcaccgaaccgacatcctgcggcgaatcagacaccgacagcgccagaaacacggtattaggggagtatgcgcgcgatttcacgagaatttcagctccgccgccaccctcgccaccgggaacatgcacatcaagcagcaccacatccggcttcgtctgcgcgatcatcgccaccgatccctcgacatcggccgcttgcccgacgatgtcgaaatgcggctgcagcgttgcgataacgcccgcacggaacatttcatgatcgtcaacgatggcgatgcggatctgctgttcctgctcgttcattgctgctcctcgaaatggttggtaggttgattgctgaattgacggttatggtgattgggaaaatcggtttgttgtgagttgctttgcggctcgtgcgattgctgcgcattcgtgtcggcggctgcggatgcgggcatgtctgcgattggcatatgcatgcgtacctccgtgccccattgcggtctcgatactatctccactgtaccgccacgacgcttgattcgtccgataatcgattcacgaatgccaaggcgattcgcggggatggcattcacgtcaaatccgttgccatggtcgcgcacgaacacttccaccagtttgctgcttgcctcgcagtagacggaaatcggctctcctccatgcgctaccgcattgataagcgcctgttgcgtggcgtcaagcaacgcatcggtttgcgcgcttggacgtgcgtcgcccaccgtcaccacttcgatcggcttgccatgcgtgtcttccacatgtgcggcgatttctttcaagccggcgttcacggaacggtcagacgtggtgcgttcctgatacagccattcacgcaattcgcgttcctgcgaacgcgccagcgaaaacaccgtctgctgatcgtcggcatgcaactgaatcagcgccaacgtttgcagtacgccatcatgcagatgcgcggtcatgtcggcacgttcctcttcgcgttccttcgatgcgcgttccgtgcccaaatcgcgaatcagcgccatgatccatggcacaatcgcaagcaatacgccaatcagcagtgccaaaccggcgcacagtatgcgaatcatggaaaacgcgtcaaaatgcatgcaggaactgacatacaaagcgtatgcggcgaaaataatcgcaatgccgccaagcatcgtccataactgaccttcttcggcattgaaacgcaaccaggagacgccgataccgaccagaccaagcagcaggggcacaatcagagtgcgttcaacaccgcctgcgaacatgacgaaacagatggaaagcagcatcagaccagctaatgcaagcaaagcgggttttggtgctttcttcagtgtctgctcaagactttcgctggaagattgcgtatcgccatgcgttccgtcgttgcatgcagtcgtatcttcaaaagatggtggttgcgtgtgctgaccatcttgcggagctgtaaaagattgatattccagggaaacaggatatgttccgtacggcatgttgcctctggaaagcggtgcctgccatggagaacgtttgccggcaataatgtacgtctgctgtatggggtctcccacgggaagtgccatccacaggaaaatgtaagcgatgagccctgaaccgaacagacatgtggtggcgaggaaaaacaggcgcacccatagcacggcaatgcccaaatgcatgctgatcgccttgcatacgccggctcccatgcgtccgtatggaggacgcatcaacggcagtttggccggctgcgtcggcagcggacgtccctcatgcagggcttgatcgcagcagtagcgcatatatacggcgctcgcctggtcgtattggctttgcgtataccacggttttcctaaggatttcatacttctattgtgccctgtgagggacgccgtttcagggcattcatatagtgttcagggcagattcagggtgttccccgatacatgtggcatgcgcgagttgctgtaatggaaccatgagcaatgcaaacaatggtccgctgggcgatcgcggcaacgcagggccgcagccttctgctggacagccgtatcatcggcagcctgcgtacggttcgccgcaaccttcccgcggcggccgtttcttcgcgtggattcgttccagccaggtcaagcgtggacatgaccgttggattggcggcgtgtgcgatggcatagcacgtcgtcttggttggaataccacgttggttcgtgcgcttatggtggttgccacactgtttttcggcgcgggtgccgcgttctatggcctggcgtggtttgtgctgccggatgagcgcgacaatcagattcttgctgaggatttgattaacggcaagtgggattggaattgcattggcgcgctgttgtgctgccttgttgccatctgtttgccgggggcaggatggtttgctttcgcgttggccgcgttggtgctgtggcttctgctcaataggcagatttatgcgccgaatgttcctccaaatcagtggcagcagcccccgtatggtcaggctccgtatggtcaacctcaatatggtcaacctcaatatggaaggcctctgtacggacagccggtgcctcctgcatcgccgtctccagcgcaatcgaatccttatacccagccgatgcagacgggtggcgcatataacggggtggacaacacggcttcaacaccggaatcgcaatcgtcgcagcctcagcgtcctcaacctcagcgtcctcaacctcagcagcctcagtatcatgcctgccaacagccggtcaacggtccggccgcttttgccacggccaatgttcctccaacgttcactgctccggcggccccggtagcgcaggcgcctacgtcgccaagatatggacgtcgcaagcctgccggtccgctgctggtgttggtgatgtccggtcttgcgatgatcgcatgcgcgctatgcgtatggtgcattatgacgtacggcgttcaaggcgggcagcagggtaccgaatacacgttgcaggcatgcgcggcattcgtcggtggcatctgtctggtgacgggaatcgttattatcgcgctcggattcgcgggcagaagaacgggaggattgcatcctctgacatggatatccatattcatgtcgttggtcatggtgatggctttggcgggttattcgctgctcagctatcggattaacacgggcattccctcatcctacaagagggtcaatgtgtcggggatgaccaccatgggttccaccgccagtgaaatgagcgaatacgagcagggcatcgtcgcgcaaggcaatgattacgccaccgacgtgctgcatatcgacttaagcgattacgcgaaaaacaacggtccgcacaaagtggatcttcaggatggcacacagggcacaacttcctgccctaccggaacgttgaatgtggtggcctcaagcgcgcaggtcgtggtgactttgccgaacggttgctggtggacgttcgggtctgacggtaatttctacaacatcaccgatttcgtcggcagtccggacgggctcacgttggattccggcggggtcgagttctcgattctgagcaacgattccacgaaatcggtagtgaaaaagcgtgcgctgggaacttacgattggagttgcggctcgtacggagacgaatccggcatcgaggatttcgatgatgaggccgatacggaagatggcacggataccggcaccgattccactaggaccgattcccctttcaaggacggggatgtagacaaggcctaccgcgaaatctacgacaatcatcaatattggccgtgcttcaccggtgatgacaaggctccggtcatgccagccggactgcagatcaatgacgtggcaacggtcggcggcagcgtcgcggtgcagtatgcgtccgacaacacattgggcaaagcgggaaaggagtgaccatgagtgacgacaaaacccaggaaatgccggttatgacggatgccggagatatgcctaccgaaacgttgcataccgtggatgcgcagtccacgtatgaccagtcgcagcacagtgggcgtgcaacgcaggatgataagccgcgcgtggaatccgttccagcacaaagcgttccgacttataccgcttcggcagccggtgcgaatggcgggcataagaatcggcagattggagacgacatcatcagaccttccggaagaagcggttcgaccatcgcgctcggcgtgttcacgtgcttcatgggggtggtgacgttgctttgcggcatgcatgtgccaatgaatctctggtggtgggccagcgatccgaaacagtccttcgtgttcctgcttggaggcatcggcgtgctgcttatcgccgtcgccgtgatttgggcgatagttagcgcggtgcgttcaaaccgatccaagaatggaaacgatgtggacagcgacgatccattcgacgctccccatagctcggataccacggccttttcgactgattcggataagtcgccgctttcggaacgatcgtgagaatcagctgaataactcctgatgtcagccgcaccaacgaaatcaaggctgacatcgcaaacaaatgcgtggccaccatggcatgaccaaatccaacacttgcttttccatcttgacgttggattttggtcgtaccatggtggccatttttattgtgatttatggtgtttgctgcagttttcggtaattttcacggtgtgttttcactgtgttttactgtgcggcctcagcctgtgccaaatcctcaaatccagccaaacgaaccgtattgcgaatcgtctcttcggtgagattgcgccgctcatgccgcaaacgctccacaaaatcgcggtacaatgccacagtgcggtcggaataggttcccaattcgccgcgcagatacgtttcgaacgacgtggtctctggcgtatcttcgacagtggtcagcacacgcatcgcctcgccgagatgaggaaaacgctcacgaaaatcacgcgcccacgacacctgaactgttatgatgccttcctgcaagacgttgcgattcgcggaaatccggggaatatacggcgcaatgtttgcacaatactcctgtggatatgtggattgcatcatgcgaccatacttttccgtcaccaaattacgtccaacacggtcggcttcctgcaagtccgaccggtaactgcgcagcaattcctccggccacgtcatgaactgactggcacgcatctgatgaaacatcggccaattgccttggcaggacgcgcggccgccctcattattggtttgctgaaactgattccactccagtttgataatggattcaacaagatttgctgtatcgtgaccgtctattacatctgaaattacgctgctattcatatgatttcgattcttgatttcgtctgattattgctctgatttgcaatgctcgcgatggattttttgattgtaggcacgtcacaggctgtgcagacaactcgcgtcggacttgatatggttctcaacatacggccgctgccattccacaaacgtttcgtgggattcggtcaatccctcccgcagcaattcatccacaacatcactgcagatgcgctcaacagtggcgataatgcgctccgccgcaggcttcgcacccttgccgccctcaccgaaaccgacaccgccgaaacatgcggcggaactcaatcgcaatatgtcttccaactgttcgcacacgccggccagccttgttgccatacggcggctcagcttgcgcatggcagcaaactgccatttgtaatacggcagatacccaacgctcaccggctcattgatcagaaacatcaacgaagccgtggcgttcacgaactcatgaatgctcaacatcgcagcagcaccatcgccacgttgcagcatgcgcggcagattgtattgccccgcctgagccatcatgcccaaacggcgggaaatcaaggaaagtcgaacatcttccggcatgaacttgaacccctgccgagtcttggaaaacacccccaacggatcagcgaacacctgaccgtttgtggcagtggccaacgtatcttcctgcaaacttagccaagatgcaacatcgttctgcgccggagcctcacgaaacagcgtgatccgctcgaaaaaatcgccgatacgaaacacgccatcacggcggaactcgccttgcgcacgcggcgtaagtggcgattgagatgcggtaagagcgtcggaattagccgaaccatgccctgcaaaatgcggcttgccctgctcggcaacagtgaaatcgcgactcaacgcatcgtaatcagcctgcaattgctcgccaatcgcatcataatcctcatcggtaagccacaggcagaaacgcggcgcgaaatcatgatcgcgcgacagctcatcgtcgaaaccgaaacattccgaaccataaccaaccaaacctgcggcaatccgcccctgatatgccgaatatgcgccggcaagcaacggtttgccgagatcattccagaatgcgcgagacaaagcaagtcctgaaatatggtgagaaatcgcaggaatcgaagatgcgccggattccgtcatatagtgcggttcacttgattgctgagattcgattgatttcggtgaatgctgagattccaaggattcttgcgattcttgatattcttgcgattcccgcgttttatgagatgatggcatgtgcttatgcaacgcctgttttgccacttcaagattgactgcagtcgtgtgatagtagtcggtgttgcgtccgtagcattcctcaatcacgctcaacgcatgctcatagccggaaaccgcatcctgcaggcagccggccatatagcaggcctgcgcatagccggccagcgccgaagcataatgcgcactatgttccaaatgcccggtacggtagattgtcaacgctttctgggcatgctgtatggcatcgctcgcccaataccggtccatctgcaggagcagcaatgcaagattggtgtgcgtggaggcaacgtcgatgtcagcgctcgcatcgggggaagattgctccaacaggtccagcgcctgttccagctcgcgcttcgcctgattgagacgaccggtttcgctgtacaacatggacatattgttatgcagcgcggccaggcgtcggtcggtgggggagaaggcggacgtggccgcgtcaagcgcctgacggtacagctgttcggcctcctcgtactggcctgcggctcgcatgcccgtggccgcgttgatcagcgtcgtagcccacgcctgcgggtcgatttcctgaagatgcaaatgatccgcaatgcttaacgattcgcggataatcggcagattgtcggtatggcgaccttgcgaacggtaaaaccccatcgtttcgttcaacaccgtcagcaaaccggcgtcattatgactgtgttcggcttcggtccgcgccttctgcagatacggttcagcctgttcaggagccttatgcgcatcgaaaatcgcatcaagaccacgcaaaaatcgctgtacatcaaacgttgcgcatccgtcatcgcaattattcatattcagattgacatcactgtctgccatcgcaatcccttcatcggtgacttccatcatctcccgaaccgcagacggcatcgcagacggcgaaacaacgaaagatggggaacatgcgatacgtcgtacaaagaacaacgggatatctcatcacaataattgtgatgagatatcccgttacataacagaaataatcgaaataactgactgtcgaatgtcagacatgcacttcgcgcatacgctccgtagcacccgtatgcgtttcgtaacgacgcgaataggtgaccagcataatcaccgcgatcaaagcgatcggagcaccggccaaaccggtgtaatggtagttcatggtgtttgccgtcaatgcggcaccaccaacgatcgaaccaaccgcattgccaaaattgaacgcgatctgcacggccgcgcccgcaatcagctcgccgccgccctcaccggcctgcaccatcagcagctgctgtggagacgagttgaagaacagtgcgaaaccaatcaggaatgtcagcagagcggtggtcacatgattgccaggaacaaagaacaccaacagcaaaccaaccgtggcgatggcctgcgaaagcccggcggtggcaccaggcttccacaaatcagtcaaacggccgcccgcaataccaccgatcaccatgccgaaaccggcaagcaccattaacaggggaaccagcgaagaatcccatccaccgaccttctgcagccacggcgaaacgtagctccaccagcagaaaataccggaattaccgcagaacaccgccatgagaataaaccacggaccggcgtgagtgaggaaacggaactgccccttaatgccagcgtccttgatcggcgcgacgaacggcacccacgcaatcaccaacatcatcgtcatcaacgcccaagcggcaagaatcgcaaacgccaaacgccacgacagcatttccgaaagcaatgtgcccgcaggcacacccaacatattggccaccgtctgacccgtcaccatcattgacacggactgcgcttccttgcccttatcggccaacgtcttggcaatcagcgtggccgtaccgaaaaacgcgccatgcggcaagcccgagatgaaacgagcagccaacaacatgggggaattgaacgaaaccgcgctcaacgtgttgccgaccagtgcgatgatcatgaacagaataatgagattcttcggcggtaccttacggccgaacaccagaatcagcgtgcccacgcacacgcctatcgcatatgcggaaatataatggcctgccgcaggaatgctgacctgcatggcggcggctgtctgaggcaaaatgcccatcatcacgaattcggcggcaccaagaataaaggcgccggaagccaaagccagaatgcttcttttcacagtctctcctccatgaatgtgaagcgtgttggtgtgcgcgcttgtttacgcgcttgtgtattacgtgttttttgatttttcaggtggttgcgtctcgcatatgctgttttgcaccgctgatgcgctggaaataaaaaaggcggaaccgaagttccgccttgagttgtcgggctggcgggatttgaacccgcggcctcttcgtcccgaacgaagcgcgctaccaagctgcgctacagcccgtttggcaacagttggaaatattacacgattgcttaggtaatgcaaatacggcgtgtcgcgtgtggtgtagtggcttctcggtacactgtgggcttatgagtgagaccatcgaatcgcaagaaaatcagaatgaagaggctgccgttcccgctatgactacggtggagcgcgccgaaatgctgctgcagcaggatgcggctatctacgccaagatcaatgacggcgccaccctggatgaggccgtcgatccgggcaataaggaattcggcccgctggcgcatccggaacaggtgcagatgcgtgtggccaagcgtgccatgatgcttaaggacggcattcagccgtacccggtgaccttggacgtcaccgccaccattgaagaggttcgcgccaagtatgacggcaagcttgaagcaggagatgaaaccgaagacgtggtcggcatcgccggtcgcgtgctcttcctgcgtaacgccggtggcttgtgcttcgtgcagctttccgctggcgacggcaccaagatccagggcatgatttccaagaaggagattggcgccgattccttgaagcagttcaagcagctggttgacttgggtgatcacctgttcatcaagggtcgtgtgattgcctccaagaccggcgaactgtccgtgttcgccaccgaatgggccattgcagccaaggcgcttcagccgctgccggccctgcacaaggacctgaacgaggatacccgcacccgcaagccgtacatcggcatgatcgccgacgagaagatgcgcaacatggtgcgtaaccgctccaaggccgttgcttccctgcgcaagaccttcgccgatcatgacttcctcgaggtcgagactccgatgttgcagaccgtgcacggcggtgctgcggcccgtccgttcaccacgcacatgaacgcgttcgaccttgacctgtatctgcgtatcgcgccggaactgttcctcaagcgttgcctggtcggcggcatcgaccgcgtgttcgagatcaaccgtgacttccgtaacgaaggcgttgacgccacccatgctccggaatttaccatggttgaggcctatcaggcttacggcaactacgacaccatcggcgcgctcgtcaagcagctcgtgcaagacactgccatggacgtgttcggcacccacaaggtgaccctgctggacggttccgaatacgatttcggcggcgaatggaagaccatcagcatgtatgattccctttccgaagcgctcggcgaggaaatcgtgccgaatggcggcccggacaatccgggtacttccgtggaacatctcggtgccattgccgacaagctcggtgtggaacgcgacgatgtggagaaccacggcaagctcgtcgaacacctgtgggagcacttctacgaagacaagctgttcgagccgaccttcgtgcgtgacttcccggtcgaaacctccccgctggtcaagggccaccgttccaagcccggtgtggtcgagaagtgggatctgtatgtgcgcggcttcgagctggccaccggctactccgaattgaacgatccggttgtgcagcgtgaacgtttcgtggctcaggccaaggatgcgctcgcgggcgacgaagaagcctgcgatattgatgaggacttccttgaggctctcggcgtgggcatgcctccggcaggcggcatgggcatgggtatcgaccgactgctgatcgccctgaccggcgccaccatccgcgaaaccatcaccttcccgctagtgaagccgctgaattaaggcaaagccttaattcaatatcggcttcacgcgaggcggaaaagctgacggcccagtgggccgtcagcccgccggagccatccttataaaaattgccgctgaattaaggcaaagccttaattcaatatcggcttcacttgaggctgcttgggtacaaccaggcagccccgcgtcttttaatccccaattctgttttattccctaatttctggcgctggtcctgtgctttcgcgcacgacaagcgttggtggaaacaatagcgtgcgctgcgcgtcttcggactgatgtttggatagtaatgtggcaagtgttgctcgggtcatttccgccagtggctgccgcatggtggtcaatggcggtccgagatgccgtgcgctgttgatgtcgtcgaatccggtgacggacagatcttcgggaatcgacagtcccaactgatgtgccgcgtcatatatgccgaatgcctgcgtatcgctacaggcaaatactgcagttggacgattcttttgctgcagtagatcaagcgcgtgcaagcgtgcattttccgaccagtagtcgccttcgcgcacttgagtgtcattgagaacgatgtcatgctgtgctagtgccgcacgaaatccagccaatctggcggggtagcaggtggtggacattgggccggtaattgccgcgaattggcggtgtcctaagttaataagatggctgccgatttcgaatccgcctgtccaattgtcgatgcgcacgtccatgcaatctttgcatggtgttccggatgggtcgactaccgcatatcgagctccaagttcttggcaaagcgttcgatctcgcattggcacgtaggcgttgtcgaaaatcactgctttgggtctggctcggcggattgcttgccggtaggtgtcgttgaggatgccatcggaggcgtttttcgcgcagatggtcacggtcatgcttcgtttgacggcggtgtcggtggctccttgcatgatgtcgagcacccatgggttgtccatggattcgagcaccaacatgatggttgtggacagcgcgtgtttgactggcggtttgctgtattccatgtctttgagcagcgcttcaatgcgttgccgtgtttcgtcggagactccggaacgtccattgatgactttggagacggtggatggcgtggtgttcgcaagtttggcgatgtgcgacagcttcggtcgttgactggcggtacgcatattggtttgcgatgaagacagtgtcatgatagcagtatagtagagaaatttcttctaatgattgctatgcagtgtaatcattgtgttggagtgcatgataattgctgtttatctgctgtatattgacatttgcaagaaagaaatttccttatcatctcaagaatttgcatttcattttctctactctgacatcagacggcgaaaatgcaatatacgcaatgagcgcaggtgcgaatcggccgtcagggataagaagcattgtcatcgcgttgctgcgaatggcatgatggctcgtattgcacgggctgttcgggattctcgacaaaggagttgttgtggacaacgcgaacgttaagctctcccttaaggagaagctcagctatggagcgtcggattgcgcgtacaatctggtgttcaacgtggtcaccacgtacatgatgttctattacaccgacgtggccggcattagcctgctgtctgtcggtacgctgttcctggtggtgcgtgtgcttgacgcgattgcaggtccggtggtgggtgcgcttattgataaaacgcataccaagtggggcaaggtgcgtccatggttcctatggttcggtgcgccatttgccatcataggtgtcatggcgttttcggtgccgaacttcggcggcgtaatcaagatgatttatgtgtacgtaacgtacatcatgatgaatttcctcgccgtcacggtgaccacgccgtgcaccgcgctgctgccgaacctcaccaccaacgcccaggaacgtgtcaatgcaaatgctttccgtaatgtcggcggtcagatcggcgtgattgcctctggtatgcttactctgccgttggtcaacctgatcggtggtggcaatcagcagttgggctttaccgtcaccatgatcatctatggcgtgatctgcgtgggtctgttgctgctgacttttgccaatacgcgtgaacgtgtgtttacccctaaggagaaggagccgccgttcatcaagagtttcgtggccatgctgcacaatgggccatggtggattcttgtcaccctcaaccttgtcatgttcattggtgtggtaaccaaggcctcgtccatcgtgtacttcttcaagtacaacgtcggcaacgaaactctttcctctttggctaatggcatcaattcggctggcatgattgccggtatgattcttgctccgttcttcgccaagaagatgaagaaccgcaatatcgccatcatgttcttcggattcggcattattggtctgcttggtctgtacgttggtgccaagatcatgtccattccgctgatcttcgtatccatggcggtttcggcattgttccagactggtcaaagcatgggcttcgtgatgttggccgatgtggttgactatggcgaatggaagaccggtgtgcgtagccagggcttgattacttcctgcgcggccatcggtgttacctgtggtgcgggcatcgccggctggctctccagttttgtgctggaaatcaacggttttgtgcctaatcaagagcagacggcgcaagctctgaacgccatcaacatcaacttcgtgtggattccgatcgcctgctgcgctatcggcactgtgctgatgctgctgtacaaggtcgatgatcagatcggcactattcgtgaggaactcgcagtccgtaatcaggtcgttgctgagtaaacgcaccctgcgtatcgcgcttcgggcttcgaaacggtttgatcccaattcccttttccgttcgaagcccggaacattcgttttacaaaccaataaggaaatcatcatgagtgttatggaacctgctgttttcacagtggaacgtgccgacggtacttctttgacgttacgaggtacccgttatctgccggaaggtttttcggaagacggacattcgccggtggcggtgctttttcatggcttcgggggcaatcgcatcgacttttccggatttgtcgtgcaaatggcgcgagaacttgcttctcgtggtctcgtggtcgttacttacgatcgtgctggtcatggcgaaagtgatggtactttcttcgataccaccgttagtggcgatgtcgaagacgccttgcaggtagtggagcaggctcgtcatatgagcggctgcgatccggataatctgcatttcgctggactgagccttggcgcggtgatttgcacgctgttggcaccgaaggtgcctgggcagcccaagtcgatcgctctgtgttctacggccacttcgtatgttgatgagattgccggtgggcatattcagggtaagcctctgtctgccatcgaagagcaaggctatcttgactttatgggtgttgccatgggaccggccatggtggaggatgcgggtcgtaccgatccttacggcatggcttgcggatatcgcggtaaggtgcttgccatccatggcaccaaggatttcattcctgttgactatattcgtcggtacgaggatgtgtatggcgaaaatatgcagctcaaggtcatcgaggatggcgaccatggtttcggcaatgtgaagcatcgcgaaatggttatgccggctctcggtgattttgtggcagagcaggcaggtctgtaaggccggaaggctttgcgccgtatcggacttcttgtcagtgcacggcaagaataatctgcgacctgtagtgttgtgacctggtcgcagatttggggcattcgttcgcgaatgccctttttcccgtatccctttcgtaccacccagcttgcctaccgcagaatacatgggcgtgaggatgctgaatcgcagggtgcgattgaagctctccatgttttcaaaaaagaaatcccacgggtttcatgatatttcgcatgagtgacgttctggggcattctccggtattgtgtcgatttctggaaacagacgaaatatcaatgagtatggtcaggttgtgaatctggaatgcgggtaggcggttggaaggcgaatcgtgagtgtgattctagaatggcgttcatgggaatgacgatttggattcgtggcgctcgccctcaaacgctgccgctgggtcttgccccggttctggtcggcgttgccgccagttggcggtgggaggctttgggtggcctgcggtcgtgcccagcttttccgggaagattgctggaagagcatgatgctggtgacgtgctggggtattgtgcgttttctcggccgtggtttgcggtcgttgcgatgttgtgcgccgtggtggcggtcggtctgcagattgctgtgaattatctcaacgattatgccgatggtgtacgcggcacggacgcccgacgaggcagtgacgccgcgggacctcggcggttggtcgcttccggagtggatcccagtcacgtgttgctggctgccgcggtcgctgctttagccgcctgtgccgccggactggtcgctgtcgtcataactggtcgctggtggctgatagcgcttggcgcaacctgtctggtggcggcctggggatataccaacggtcggcatccttacggatatcggggtctgggcgaacttgcggcattcgtattcttcgggttggttccagccctcggcacgcagtatgcgctaagcgggtcgatcaccgtgacgggggtggccggttcggtgatctgcggcctgctgtccgtcagcgtcatgatggtgaataacctgcgcgatctcgaagatgacgccgcgcacggcaagcgcacgctgatggtgcgcatcggcagtgggaagggcaaatgctggtgcatgcgtgcgctgggatgggctgctggtctgacggtggttttcgccatgccattatcggtgtatgccaaacttctggatctgctcataaagctgcctgcggaggtggatcgcgaccgttcatgcacggaatatggcatatgcggtgactggtcgtggggaaacgccgattggatgagccttgcggcgttcgtatccatcgcagggtgtgtggcgattgctactcgtgccgtcgcggccgtccggcatgaccagtggcgtcgggcgttgccattgtgctcgatgacctcgttggtcgcagccggcgcgttcgtgctcaatgcctgtcaggccggtttcatggcgtagctgcatcctgcatttacgatttcgtcattgagcaccggcgattgcctgatgatgcaaacggcatgcaacagaatgaaaattgttgcatgaacgtaaccaaataatcgtcatcgacggttgtgttgggcgtgctaggcggtagactggcaggtatgacttacaaactagtactgctccgtcatggacagagcgcatggaataaaaccaatcagttcaccggctgggtcgacgtcccgctgaccgagcagggtgtcgaggaagccaagaacggcggccgcctgctcaaggagaagaacgtccttccggatatcgttttcacctcgatgctgcgtcgtgccatcaacaccgccaacgtggctctggatgaggcagatcgtctgtggattccggtcaagcgcagctggcgtctgaacgagcgtcactacggcgctctgcagggcaagaacaagaccgagatccgtcaggagtacggtgacgagaagttcatgctgtggcgccgttcctacgccactccgccgccggagatcgatccgaacgacgagtacgcgcagaacaatgatccgcgctacaccggcgatccggttccggaagccgaatgcctggccgacgtggtcaagcgcgttgagccgtacttcaagtccgacatcgagccggagctgaaggctggcaagaccgttctgatcgccgctcacggcaactccctgcgcgccatcgtgaagatgctcgacaacctctccgaagaggagatcgccaaggtcaacatcccgaccgcaatgccgctgctgtacgagctggacgagaacttcaagccgatcaagccgcgtggcgagtatctggatccggaagccgccgctgctggtgccgccgctgtcgccgcccagggccagaagtgagtttgttgcgattgatacgcaggtaatcgcgttcaatcgtacggaacgtatatgaaaaggtggaaatccacagtatgtgggtttccacctttttgcgtccggtatctttgttgggttattacgtccgtctgccggatgaaatacggaacatgagatgtgcggcagacggacgtcaatcgcaatcggctcagatcacgccgtattccttaagtaacatcggaatatcggtggaatcgagcttcttcagaatctgcttcaacacggtcttttcaatggggttgagtttcatgtcggtaatcggcttgccgtcacgcagcatcactgtggcgttgagcaggttgcgtacgtcgtagaccgaaccccacacttccggcacgccacggtccacatcgcacagcgtgtacaccgcttccatgccggtgcgcatcgaatactcggtggtgaagatcgtgtcgcgcggggtttcggcgaactggccgaggaatgcgaaattcacggcaccatcaggcaccacatcagggcggtcgccggcggaacgaggcatgaagaacgcgtcgatgtatggcatcatcaccggaacggtgttcgcatggttcgtggcgagttccttgatcttgtcggtcggcacgcccatatggtagagccattcctcgcagatttcctcgccagtgcattcctgcatcggcttcttcacatagttgccgggcttgtcggggaacagaccgtacacccacacgcacagctggtctttcggctggtcgcggaactgctgttgacggttcaacgtccagctcatcagccagttggaatcctcaacggttacgatgccgccggtcaccacatggccggtgaacgggtcacgcttacagatcttctgaatatacggcggaatctccatgtcaagcgtggtcacggtggcgctcatccacttcgaatgctccggatcgccgcagaacacgtccgggtgaccgaaactcgggtcttgcttggcaatgcgacgccacatgtcccagccgccgccgggcttgatttccggagcccatgcggccgcttcggtttgcgagcccatggtcgagttttccacgcagccaccattggtgatgaacaccaagtcgttttcgcccaaatcaatgcttcgcgcggtgccatccgcttcggtcaggtcgatgcgcgtagccattttcttggttggcgaactgtacggattgcgtacgaacacgccggattcagcctgcttcttcaaaatcgtgtcttgaccggtgccggtatgcgaacgtaccggtcccatgcctccgccaatcttgaaatcgacattctccactttcgcgttgtagtggaactgcacgccgaatccttccaaatacttgatcatcggcagaatcatcgactcatactggttgtaacgggtgaaacgcaacgcactgaagtccggcaatccgccaatatgatgaatatatcgacggatatacagcttcatttccaacgcactatgccaattttcgaaagcgaacatggtgcgccagtacatccagaaattcgaattgaaaacctcatcgtcgaaataatcagaaattttcttgccgtacagttcctcattcggcgtgaagaacaattgcatgatctccatcgaggctttgtctgacagattgaatttgccgttcgtgcctgcgtcaacgccgcgcgctttcgtggagcggcagagtgagaagttgggatcttccttgttcagccagtaatactcgtcaagtacggaaacgccttccgtttcgatggatggaatggaacggaacatgtcccacatcacttcgaaatggttgtccatttcacggccgccgcgcatcacatagccaacgccgggaatatttgcgccatcgcaggcgcctcccggaaccgcgtccttttcgaatacgtgaatgtggctgcccggcagttgcgcatctcgcaccaggtaacaggctgcggtgagtgcggccaagccggtgccgatgatgtacgcgttcttgctgtccatgccttcgggtttcttcggtcgggcgaatgcttcgtaattgccgttggaataatacatgactgcctcctttggatgtcactgcacatattgtgccgcgacattgcgtaaaagtatatgggcaaaaaatagacagattgtttaatttttcttacggcttgacgaaagtgaaataatgcgggagatagtgcttgacgattcgtgctgaaagattgcaaaaacaaaacaagaaggcggcttcagtggggaacggaagccgccttctcaaaaagaagatgaaaaagaagatcgcaagaaaaaaatcaggcgatgtcggtgtcttcgtcgcgggtcggctccttggacgggtcgaaaccggagacgatgtacaccacgcggcgagccgcggacacggcgtgatcgccaagacgctccatgaagcggccgatcagcaccacgtcgatgagctgctggttggtgccggaccaatccgcggactgagccagttcaaaggtcttcttgtgcagttcgtcgagcttgtcgtcgttgatgatgatctgttcggcggtcttggtgtcgcggtcagacagcatggccacggtctggtcggcgacgtcgttcaggaacgcctgcatttcggcgaacagcggttgggcttcggccggcagcggggaagccgggtaggtgcggcgggcggcttcggcgatgtgacgggccagatcgcccatacgttcgaaggtggtggccaaacgcatggtggaaacaaccacgcgcagatcggtggcaaccgggttctgcttggccagcagcttcacgcactggtcgacaacgctggcttcgagggcatcgatttcgatgtcgccgtcgataacggcctgggcggcttcaagattctggttcagcagcgcgtcgccggcaccgttgatcgccttgcgcacgcctttgaccatgtggtcgagatcatcggcaacagccttgagctcctcgttgaaaataacgcgcatgtgacttgcctttcaatgcttcatatatatctgggttcgatataacctctcacaagtctattagacaaacgccatattcgtaaccactgctcgtgttgttccgtcaaagttcaccaacgcgttcaccttgtgttcacgaacgagcggtggtgtcgcgagttggggagcctcaagagtgtgcaacaatgaaaccatggttgaatctttgggttcgtggtggcgttcgctgacgcaccgcaacgacgatgatgagcatgatgccgatgacgacacattggatgatgccaccaacgcgttgctttccatgctgccgttggcttccgtcgtagttgacgagcatgacgaagtgattcgcgcgcacccgtcggcgtatgcgcttggcgtggtgcgcgatgatgccatcgcggaagagaccgtgcttcgcgcagtgcatgaggtgcgttcctgtggcggcaacaaacaatttgatttgaccaccaccacccaatatgtcgcccagcaagtgccgaaggcaggcaaaccaaccacacgtgaaatcgcgcgccaggcactgatagggcagtcaaaccccaatacttccggcgcaaccgtttcccgacccaactggctgaaaatcatcgtcggcaaactcaatgagaatctcatggttgtgctcatcagcgatgtgagcgaaagcgtacgattctcgcaggtgcgcgattcgttcatcaccaacgtttccgaacaattgcttgagccgacgcaatcattggaacagctggcggacattgtggaacggggcggtgccagccaacaggacgtcgaacgcaacgccacgcagctgcgtcaatcctgttcccgtcttgagcatatgatttccgatctgctgctgctgatcaaagcgcaggagccaatcctgccgaccgccgacaatcgcatcaacgtgatggaacaggtacaagccgtggtgcaggcgcatctcgatatggctgcgcaacgcggcatcaccatcgagaccggcggtgacgaatcgctatgcatcaatggcgaagccgatcagattcaggcggcgctcgcaaaattgattgaaaacgcgattacgtattcaaaagacggttctacggtgaatgtcgtcgccaaagccaatgaggagcatacggaagcggtaatcagtgttctcgatcgaggcaaaggcatcgccatcggcgaacagaaccgtatttttgaacggttctatcgcggcagcaatcagaatgagcattccggtgacggcattggcttgggacttgcgattgtcaagcatgttgcgttgactcaccatggttccgcgtcggtgtggagcagcccggggcagggaagcacgttcgccttggtgctgccgttgggcggggaatgatgtaagacattcggcagatgttgcaaatatctcaaatggagataatgcgatgcccgtctcgctttcgataaggcaagacgggcatcatatttttttgaggatttttcgggggtatattgccgattactcgccaagacggcgataatcccaacggtcgaaatgctcccaaaccagcatgagcacgccgatgaccgtacccgcttcgcagacggtttgcgcgcgttccgcgtcgatgccgaatgcgataagtacgatgcagaccaccaaagcgatggcccatagcgcggtgccaaacatgaataccttgcgtaggtcgacgcgcaccggtttcggcgaaggtttcctcacgctgggatcaataatcggagcaatcttcatatcgccacaccttaccttgcatcagagatgttccaccacgtagtcgatacagcgggtgagcgcatccacatcgctgggttccacggacgggaacacgccgatgcgaagctggtttcggccgagcttacggtatccgttggtgtccacaatgccgttttcgcgcaatgccgccaccacttgggatgcattgatgccatcgttgatatcgatggtgaccacggcgttggagcgcgcgttcctgtcgtttacgaacggggaggcgtaatcggacttctccgcccactggtacagcagggacgcagaccttgcgcagcgggccgaagcccaggcgagcccaccgttgtcgttgagccaacgaacctggttttccagcatgatcagcgttgccactgccggcgtgttgagcgtctgatccttgcgggaattctcgatggccgaagtcagggaaaggaacggaggaatccagcggcgtgcgcccggaagatccacgcttttggcgatgccgtaggcgcgttcgattgcagcgggggagagtacggcaatccatagtccgccatcggatccgaaagctttttgcggcgagaaatagtaggcgtcggtctggctgatgtcgaccggcagcgcgccggcgccactggtggcgtcgatcagcgtgagcgcaccctgctccttggtgcctgcgatgcgtttgatcggtgcggcaacgccggtggaagtctcattgtgggcccagcaataagtgtccacgtattccgtgagctcaggcaggcgatatgttcccggctctcctgcgaaaatctccggctcctcaaggaacggtgcggattgcgctgacttggcgaacttcgagctgaatgagccgtacgtgccgaatgcggccttgcgggtgatcagcgaggcgcaggcgatatcccagaacgcgctggctccgccgttgcccagcaccacttcgtagccatcgggaatctggaagaattcggacagtccttcgcggattgagccgaccacctgcttgatgggggtctgtcgatgggaggttcccagaagattacgggctcccttatcgagcgcttggatttgctccgggcggattttggtcggccctgagccgaaacgtccgtcttccggaagcacgttggaaggaatggtcacagtgttcgtcatgacaacctagggtagtcagatggtcggattgtgcgtggtgatgaccgcttttcggaaccatgacgtggcgatgatgactgcgatatcccggtgtcggtgtagcctgagcttccgtgacggttctgtaaccacgcggtcataagcctgctgtggttgaagtaatccgcaaggagtgttgatatatgaggcatgcggcgcataaagctgccaaggtttcgaatgagcgtttcagcgttgccaaggcgctgttcacctcgagccgcggttcccacaccgccaaggccgttcgtatggtccagctggcaaatggtgggggtgccgttgtaggtcttgagcctgcggttgccgaaaagctgaatgaagtggctccgatgagccgccgcgccatgcgtgaagccgctcgtgcggccggtcgtcgctccgcattcatggcttccgcatcgctggctgcgttggttggcaccgcggccactgccatggcggtcggccagcagaatgcgtctgaaatgacttttgccgacaatgccaccactaccacgcagatgaagcgtgtctccgacgatgcggcatcccgttccgagtcccgtagcgatctagacgctctggcctccaccagcaatagcggtgattggcagcttggcgaaaccagttcctccatggacacgaatcttctgtcaaagtccattgccgacaatcccaatgtcgccgttctcatggatcaggacgccggtcttcttccttcgggcttcaatccgaaccacggcaccggtgataccggcaatgactatccatacggtcagtgcacatggtgggcgtatacccgtcgtgcacagcttgacctgcctgccggaagccattttggtgatgcgcggagttggggtgattccgctcgcgctctcggctattgggttgacaatacggcacgtcacgttggcgatattgtggtattcgctccaggccaaatgggcgcggacagctattacgggcatgtcgcgattgtcgaaggagtgaatgccgacggttcgattaagatttcggaatccaacgtcaggggtcttggcgtgatttccgatcgtacgttcactgcgcaggaagcttcgcagttgacatatatccattactgatttctctgttttcgttaatctgcgcttgccgtcacttttttggcgtagcgtgattgcgtcggcgtgtcgcgtgatatgacactgttctggttatcttgctgttctgctgcgggggaacgtgtatggtagcttcagacacgatgaatattgctaaacgtttcacgagtatcttcgccgttgttgctgtatctgccttgttgggtgcggcggttcccgccgcaagcgcaggcggtgctatggctgataccacggtaaccgctacacgttctttcccgaagaccaccgcggccaagcgtgattttctcgccgagcacacatccacggatgttgaatctaacgccgattggggtggcatcgaaagcttggatgttccccagaccgagtctcaggcggaaaaggaccagaaggctcaggagcaggctgaggccgaagctcaagcacaggcggcccaagctcaggcacaggctgaatctcaggctgccagtcgttcttccgatcgtgcttccatcagcgttcctacggctcccgcgagtgccactgggcaggctctggccgactacgctctgcagttccaaggttatccttacgtggccggaggcaatactccgtccggctgggattgctctggtttcgtacagtgggtgttcgcccagttcggggtaagcctgccgcattattctggcgcccagatgagcgttggaacggcagttggaagcattgccgaagcagctcctggggatatcatcgtcaatactcagcatgccgcgatctatattggcaacggcatggtgatcaacgcgctgaatccggctcagggaacgcaggtcacttcgctggccgtgttctcaggtggctatgcgattcgtcgtgtgctctgagtgaacatacggtttgatttttttaaggcgtatcctttcggggatacgcctttttgtatggaaaagaccgagtcgttactgacaaaaccgcatgtcgcgcggtatggtggagcctagaggcgacgcatggtcgcgttgccgaggtgattcaaggaggtcgtccatgattaacgacaaggcaatcctcgttggtgttgatggatcccacgccagctataaggccacttggtgggctgcgaactatgcgaagcatgcgggactgacgctgcagatcgtatgcgcatactcgttgccgagctatgccgctgtctccttcgacgcgacatacaccgccatgggggatgacaatgcggcccatagcgacgcgcaggagattctttcgaaggccaaggccatcgccgacgagcagggtgttgaggctaccacgcttattgttacgggcgatccggcttccgtattcgtggaactgtctcgtaactacaatctcatcgtcatcggcaatcgcggcaaaggcggtctggcggaacgtctgctgggcacgaccagctccagtctgccggcgtatgcatactgcccgatcgtagtggtgccgtacactgacgatgacggcaatctgatgcacttgaacaacaccatcaccaaggtggccgtcggctccgacgaatccaagtggggtttgaaggcgctggagatcgcggcgaatttcgccgccgcatgggatgccgagctggatgttatttccgcggtgccgaacatgaagggttccgacgacgaaggtgtgatggcctcgttcaaggatgatctggaagtgcgtatcaagccgcttgaggaagcccatccggatttgaagatcaacaagcagatcgtgcctggcccggcggttggcgcgctgaccaaggccagctatgatcacgacgtcgtcgtggtcggttcccgtggtcgcggcggcttcactggcctgctgctcggctccaccagccagggcttgctgcagcacgcggtcggcccggtgtatgtggtgccccgcaagtatgtcgaggctgcggaaacccgtcttgacacggttccgagctcgccggcggaagtcaagccgaaggctcttgacgatatcaagggtgtcgaggaggtgccggtttccaaggccgagccggatgtggtcgaagccatcgaaaccaagatcgatcccgatcgtcagtaaattcaacaggtacatataaaaaggcgattgcaacactgcgaaaagcgttgcaatcgcctttttttttaaaaaaagaaaacgtcagtgcttgatgatgacgtccatgcggaccggagtcttctccacgtacgtatgcttcaccgtgcagcccttgtcgatatgacgagtgacgcgttccttaagctttgccgcatcctcatcgctcagaccggcgtcggtggcgtcgatgaccacctgttcgtcgaaaccgatgtatgcgtcattgtcggcgtcataggtgccgtccacaacgattttcgcgcccttgccctcgcccagcgtatgctcgatggcgaactggcttgacagtgcggcgcaaccggccagcgcgatcttcatcaggtcgcccggcgtgaactgtccacgacccttgccgaacttgatatgcgcgccatcctcgccgaaagcatcccaagaaccgtctttgttacgctcgacccacagtcttttgcccatggtgaactcctcatcgtcttgccgggagcgccgttcgctcctcgcctacatacctaatgtaatccattgatgcctgttcgctaggaggcattccgaaaagcgtaaacaatcaacgcgcgggtggcatatgcttgacctgccgttctgtactgttaagcttgcaaccatggctttgacacctgaacaacttgcagatatccgtacccgtattccggcacgcccggaaaccgacattcccatgccatatgaagaccttgtgcgcaagatcctgacggaaggcacgttgaagtccgatcgtacgggcactggtaccgtcagcctgttcggccagcagatgcgattcgacctgagcgagtattttccgctgctcacgacgaagacggtgtttttcaagggacttgcctatgagctgctgtggttcctgaaaggttccacgaacgtgcgttggctgcaggagcgcaatgtgcatatttgggacgaatgggccgatgagaacggcgatttgggtcccgtatacggcgcgcagtggcgtagctggccggcgcccacgcccgatgatccgaaccgtaccatcgatcagatcagcaatgtgcttgatcttgtcgagaatcacccggattctcgtcgtatggtcgtgtccgcttggaatcctgccgaagtggagaatatggcgttgccgccatgccacgcgctcttccagttctacgtggcggatggcaaactttcgtgccagctatatcagcgttcctgcgacatgttcctcggcgtaccgttcaatatcgcatcctattcgctgttgacgttgatgatcgctcagcaggcgggactgcagccgggggagttcgtgtggacgggtggcgactgccacgtgtacgacaatcacatcgaccaggtgttggagcagttgagccgcgatccatacccgtatccgcagatccgtattaacaaagccgattcgctgttcgattacgattacagtgattttgaaatcgtcggctaccagcaccatccaaccatcaaggcgccggtggcggtctgagagtcgtcgccagacgttagactactgaccctagttcgactgcaaggagtgagtgaaatggagcatgacagtagccgcagtggctatcacgaacccgagcccggacttgccgggcttgaggacgaggaggattggggcgatgatttccccaagacgttctcggtgaatctgatttgggcgcaggcctgtgacaaggaaggtcatgacggcgccatcggattcgagggtggcatgccatggcatctgcccgaggatatgaggcgtttcaaggagcttaccgtctcgcatccggtcattatggggcgtaagacgtgggagtccctgagcccgaagtatcgtccgctgccgaatcgcgacaatatcgtggtttcgcgtgatccggcttacactgcgccgggagcgaccgtggtcgacagtctggatgatgcgcttgatctggcacgacaggaagccattccggatgacggtcttgaccgcagcgaaatctggattatcggtggcggccagctgttccgtgaggccatgccatttgcggacaaggcgtatgtgacgcagatcagcatgcatgccgatgccgatacctacgcgcccgacgtgaagtcgctggtggaatccggcgcttggaaggtgcttgaagagggcgtgtggcagaacacgcggaagggttccggagatatcgccggattccgtttcatgacgtatgcgaagaatcgcgaggagtaaccgtatgtataccgtgatgaccgtgtgtaccggtaatatctgccgttctcccatggccgaaatcattctgcgcactgaattcgagcgtcgtggccttgccgacaaggtcaacgtcgagtccagtggcgtgagcgacgaagagtatggcaatccgatcgatcgtcgtgccgtcaaggtgctccgtgagcgtggatatgagctgccggcacatcatttcgcccatcgcatcacccgcgatgagatcgagcgtaccgacctgtttctgccgatgaccgcttcgcatatgcgtgcgctactgcgtcagctgccgcaggccaagcgtgagaacgtgcatatgtaccgtagtttcgatccgaatcttgccaagcctgtcgcaggctacgaaagtgagattgatttggtcgatccttggtatggcggcgcccgcgaattcgaagtggcgattgaccagattgaggaagtggccccgttcatcgttgattgggttgagcggcagctctgacgattgcatacgatttttccgtcgaaaagcccggttcgcaagagccgggctttcttgtatccgtatgatttcaatgatttcgaaagatcttaagaaatcgcaagagattgcaaaagtaatattgcgcaattgatgtaaatcagagaaaaatagaaatgaaaaataaaaaagcgaccccggccggacttgaaccggtgacctccgccgtgacagggcggcgctctaaccaactgagctacggggccgttgtttcagccttgcgactggcaacagatagatatattacggcaaagtcgctatcgtgcaaatttcggcgtgtcatcgatgaatattcgtatgaattgctgaaagaaagtatttgcttaaactgcggcagtagtagggaagaaaagcaacggccggtcgcatatgaggggaaaacttctcatatgcgaccggccgttaccgttgcggtgccgtgttgtcgctcacgacactacgaattgctggtggaatcagtcggtctgtttccaggtctcgacgtcgatgtggtgttccggattggcctgccatgcatcccaagcggacttcacgatgtcttcgacgttgtactgtgcgtgccagcccatctcttcgttgatgcgcttcggggagccgatcaggtgcggcggatcgcctgcgcgacgggccatgacggtctcttcgaacggcaggccggtgaccttcttgacctcatcgacgatctgacgcacggaggtgccttcgccggtgccgacgttgaaggcgtcgtacttgcgttcatcgcggtccagatacttcagggcggcgatgtgggcgtcggccagatcggagacgtggatgtagtcgcgcacgcaggtgccatccggagtcgggtagtcgtcgccgaagatcgcaggggccttgcccttcttcagacggtcgaacagcatcgggatgaggttcaggattgccggatcctcaagctcgaccgggccgcagccggccacgttgaaatagcgcaggccgcagaagcgaatgccgtacggctcttcgcaggcgcgtgccatccactcgccgaacagcttggtctggccgtacgggttgatcggcagcatcggaacgacgtcttccggaaccacgtcgaccggcggaacgccgtaggtggctgcggaagaggagaagacgagcttcttggcgccggagtcgcgcatgccgatgagcacgttgagcatgccgttgatgttctgctggtagtaccacagcggcttctcaacggattcgccgacctgcttgcgggctgcgaagtggatgacggattcgacgccttcggccttcatgatttcggcgaggcgttcgccggcacccggtgcggcgatatccatgccgtacaggcgggagccttcgatgcgggttggcttgccgtagctcagatcgtcaacgacgacgacctgttcgccggcctggtgaagagcgtggacgacgtgagcgccgatgtagccgcacccaccagtgacgagaactgtcatgttctgtcctttcctccaaaatgagcgttaaagcgttttggttcgaaaaacaaacgtccaacgaacgttgttcacttttgctctagtttgttaccttttgaacaatttgagtataacacatgaacaggaacgcacataatcgaccctttcctgcgtttcctctataaattagggtatgcaagaagatgtgaacacgccgactgaaaatcaagttaacggcgaaaacgaacaaagcatgtcaaaaacgcaagatgaacaacgggctgatgctggccagcgtcctgccttgtatgggcgcaaggtgttgtccttcgtgcgtcgttccgccaggctcgacgcacgcttgcagcgtgcatgggatgcctatgcagatacgtatctgctgaaaatcaacgcgggcgaggggtcgcttgatgtgcgaggcgatctggtgttcgatcgggcgtatatcgcggatgtgtggggcaatgtcaatcctctgattgtggaaatcggtaccggccagggggaaaacgttgttgcggccgctgctgaacaccccgatatgaacttcctggcgcttgaggtctatgatccgggcgtggcgcataccatgctgctcgcaggcaagcagggcctgaccaatctgcgcatcgcgcaggtcaacgctcctgagctcttcaaagccgcggcggatggatcgatcgctgaagtatggaccttcttccctgatccgtggcccaagatgcgccaccacaagcgtcgtatcgtgcagccggagcttgccggcgagattcatcgcacgttgcgggatgggggagtgtggcgtatcgccaccgacatcgaagactatgcattgcatgtgcatgaggtgatggatggtcttgaaggattccataatgacggcatgcttacggtgagtttgccggtcgagcatgttggcaagggaaatgccgacgaagcggccggtctgcgacacgccgatttcaccgaatccgagcgtttttccggacgaattctcacgaattttgagaaaaaaggacttgctgccggtcgtgtgattcatgacctcacctatcgctgcgtatagtgccggttggtctgttgttgaagtgctgaaatggcttgatttcaacgattttcagcactttggcaacgggttgatggcgattttgcgacgctgcgacacgccgagatttgcatgttctgaggattcgcgtatagttaagcgagttgtcacgcggaaacgctgaaagcgcccccttcgtctaacggttaggacaccagactttcaatctgacaacgagagttcgactctctcagggggtacttaccttggtaacaaggtggcaatggccccgtagctcagttggttagagcgccgccctgtcacggcggaggtcaccggttcaagtccggccggggtcgctcgaacagattcctgttcatggctctgtagctcagttggtagagcgaacgactgaaaatcgttaggtcagcggatcgatgccgctcggagccaccatggctttgaaacctcggaaacatccgaggtttctttgtttttgcccacacgtatgacgattgcggccgtatgtctagcgccaagccactgatgccggctgttggttgaatacgcgctcgcattgcgggtaagccccctaaaatggtcgacgcaagtcatgttgacttgcgagttactgagaaatgactaagaaaacctccgttagagggggagtctgtctgctgtttggctacactggaacaccgtaaggcagtaacaatgggggtttgtgggcagagttatgccgtaaccccgttaagggagtattcgctggggtggcggcatggaagtgcttctggtcggcaacaccgacttcattaccaagcagtggattcagcattcctttccccgagaccatgtggtgatagcggaacgagaaggcaccgtagacggcaatgaccgtctcagaatcgtcaacatgtctgacgccaacacccttgccgaaactcttaccacatacgaattcgatcgcatcgtattcttttccgaaggcctcaccccgcgaagtgagcgtgacggcgatctcggatatcttcgcagattgctgcacgccatacgtaacagatccacgcaaatgctgatggtatgcggaccggaatccgaattcacctatccggaaaacgccgacgtacgtgataccagcaaaagtctgatgtctcgagcgtcggaagaactctgcctgtattacgcgcgcacctaccgtctggaagcgaaaatcattcgctgtccatacttgtatgcacccgagcgcaatggagcaaccgcatatttcggcagactgttcgaacaggcatcggcagggtcgatctcattctgcgaacgcaaacagcaacagacatgctttctctgcgccgacgatcttgccgaactgatctaccgcatgttcgacgattggaccgccgaaagcgaaatcttccatgtgcccaacgtgttcgacttcacatacggtgatttggctgatgcgatcagcgcggcatttcccggattatcggtgacttttggcaaagacagaccccaacattacccagcagacgatcatgtgctgcgattgcgctatggctggtcgccgcgatattcgctcaaacaggatcttccccctgtgcttcagcgctggaaagaagcgcgtgctcaggaacaatccaagaagcacccggtctgggattttctacgcaaccattcaaaaccatggatcgcaatcgaaatcttcatcgcgttcatattggaagaactgcttcgcaccgcggtacaaggcaacagccagttgggaaccgtggatttgcgcctgtttttcgtggtgatcgtcggcacgatgcacggactgaacgcaggcgtgttcgcggccgcgctcgcatgtgtcggcatggcgttgtcgtatgcatcgaagggcgcttcattcgctccgctgttttacgacacgtcgaactggcttgcgtttgtggtgtatttcgttgccggcgcagtatgcgggtatgtgcagctgcgtaatcgcgaaaacctgcgattcatgcgtgacgaaaacagtttgctgcgtgaacgacttgcgttcctgcgtgacctgtaccacgatgtgctcgatgatcgtcgtatgctgcgcgggcagattatcggcaggcgtgacagtttcggcaaaatgtatgcgatgacacgtgaattggacgaagtgcagccgcaaaagctgtatcacacgaccattcgcattatgcaagacacattgggcggcgatagtttcggtgtttaccgcattgacagcggcggtcgattcgcgcgtttgatggctgcgagtccgcaaaccgaatccctgttcagcaagtcggcgctgcttgagaattatgccaacattattacagctttggatcatggtggattgtgggtgaaccgcaatttcgaaccggaccttccgatgtatgcggcaggcgtgcatgccgatggcaagctggccgtggtgattgtgcttgccaaagcgcagcccgaccaaatgaatctgtacttccagaacctgttcaccatcatgtgcggcttggtggaatccgcgatggtgcgtgcgttcgactatgagaatgtggcgcgtcaggcgatgctggtgccgggcaccgaattcctgaacactcgggcgtttctacccaaagtgcttgccgccaacgaactcaagcacgaccatatgggcgatcacctgctgctgcgtgtggatgatgcttggcaagacaatggcagccgtctcatgggggccattcgtcagacggacgaggcgggtgtactgcaagacggcaacgtgtatgtgttgatgaaccaggccggcaagcatgagctgcctatcatcaacaagcgtttggcccaagctggattgcatgtgacacgcgtttccgggcaagaggaagacgcgctgctggatgaggcttcggaacaagtggccgccgaatcgcacgaaggcggcacggcatgaacacaacggtagtgacgatgctgcttatcgtcatacatgtgctggtatgcgtgctgatgtgcgtattgtctcgttttggcgtgcttcgtgtggaagggcgtctgcttccttttatgctgttggtgccgctgtgggggccgttatgcgtgctcttgctgcatgtgcgtacgctgattcgtgcgggcgagcatacggctccagatctcgaacagatgcgcgtggacgatgaggaacgtcgaagcattctcgttgaggaacgagccgatttcgccaataccgtgccgctggaagaggcgttgatcgtcaacgattcgagtcagcgtcgcagtctggtgatgtccattctcaacgacaatcccagccattatatcgatgtgctgtcgcaggcccgactgaatgaggatgtggaggtcgtgcattacgcggctaccgccatggcacagatcagtgccaaggaagatcttgcattgcagcgctgccgcaacgattatctgcagcatcgaaattccgaaacgatgttggaacgctattgcgatgcgctggaacgatatatcaattccggtattgcgcaaggatacgcattgcagttgcagaagcagcgatatgccgaagtattgcaggaacgacttcgccaacatggcgattattacgttgcgtgccgtcttgcgcaaatgcaaatcgatcttggactctttgatgatgccgcgcacaccattgacggcgctatggaacagtggccggatcaaggcgatgtatggctgatgcgtctacgactcgatgccgcacgcaatgatggcgatgcgttgcgccacactgttcagcagatcgaaagcaagcatatttatctcggtggccaaggaagacgtgtgctgcggttctggaccggaaccaaggaggctgaacgcgcatgatcagaggattcctgtcagacgtgttggccaagtggaaacgattccgctggcaaggtttggtcaaagtgtgggccgtgttcatggccatcgcattggtgttgctggtggaaagcttgggcgtgcattacggtgtcacgcggttcgacatcacgtatttggatcgaaacaaagccattcctgcagccaatgccatcgctggcgaaaaagctacgaatctgttggtggtcgacagttcgcaggagggcgtcagcgatgccgaagccatgctcgaccagattctgcttgatatgaaagtccccaccactacggttgacgtggctgacgaaaacgctgaatttccagcgttgactcactacagcaccatagtggtggccatgcctaatctcgaccgtctgggcgagcatgtgctgcaaatcatgcaatgggccaaaaaaggcggaggagtcatgtttgccatgactcccgaaaaaaccggctatttggatgtgatcggcccgcagatcggcattgaatcgtccgcatacgaatatgtgctgactaagggcattacaccctccaaggatttcatgttgggcggcggccagacatacacgttcagcgatccgtttgaatcgtcgctgagtgtcgcattgcatgatcgcgcacaggtcaaggccgtcagcagtaatgggcgcacaccgttgatttggagcacgttcgtgaattcaggttcggcggtggtgtgcaatatcggtatttacggcaaggtgcttcgaggattttacgcttcggcgttcagcctgctcggttctgccacggcctatccggtgatcaacagcgcggcgttctacttggatgattttccctctccggtaccgtcaggcaatggcaaatacatcaaacgtgactacaacatgagtattgctgaattctattctcaagtatggtggccggatttggtgcgtcttgcggaacggtacggtattcgtttcaccggtgtgatgattgagaattacggcgatgacaccaaggatgatccggtacggcagacggacggcgcacaattcgagtattacggaggattgctgctgcggcaaaacggcgaaatcggatatcacgggtacaaccatcagccgttggtgttgccgaatacggattacggtaaggaatacgcgtatgtgcagtggccgaatcgcaaagccatcgtcgattcgttgaacgaactgatcgcattccagaaagacgtattgcctgccgcaacatcgtcggtatacgtgccgccgtcgaatatcctctcccaagaaggacggaagatcataggcgaggatgtgtcgcagattcgcgccatcgccagtacgtatatgccttccgacagttccttgacgtacgtgcaggagttcggtgttgcggccgatggcgtggtggaggctccacgtatcgtgtccggcggcatggtgggtgacatgtacatgcgtcttgccgcggtttccgaactgaacatgcactatgtgagcacgcacttcatgcatcccgacgatttgcttgatgaagatcgtggagcgaaagaaggatggaagaagtactaccagggattggaaaactatcttgactggctggaatcgtcggcaccgtccattcgtatgcggacaggcacggaatgtgccgcagccatccaacgtttttcgggattgaccgtttcgatggaaacgtccgacgatagttgggatctgaaacttggcaacctcaccgatcaagggtggctcatgttccgtgccaacaatggcacgcctggcagggttcgtggcggaagcctcaccaagctgaccggcaacttgtatctgctcaaagccacgaacgccacggttcatatcgaacgcaagactgggggagaggcatgagaatctgcctggttttggaaggatgctacccgtatgtgcatggtggcgtgtccacgtggatgcacagttatatcgaagcgatgaaagagcacgagttcgtattgtgggtgatcggcgccaaagccgaagaccgcggcaaattcgtatatgacctgcccgacaatgtggtggaagtgcatgaggtgttcctcgacgacgccttgcgtctgagcggtgaacgcgcgcaagtgtcgttcaccgaagaggaattgcggtcattgcgcgaactggtgaatcttggcagcccggattgggatgtgctgttcaacctgttccacaccagaggcgtgcatccgctgtcgttcctgcaaagccgtgaattcatcgacttgtttacgcaaatctgcatggaagaatatccgtatgtggcctatgccgacgctttccataccgtgcgctccatgttgctgccggtgttgtacttgatgggctgcgaagtgccggaagcgcagatctaccatgcgatttccactggatatggcggattgttggcttgtttgggggggggtatcaaccatgcgccggtattgcttacggaacatggcatttatacgcgtgaacgcgaagaggaaatcatttccgccgaatgggtgtcgccagcgttccggccgcgttggatccgcttcttctacatgctttcggaacagatctaccatcgtgcgtggcgcatcaccagcttgttcggtcgtgcccgtcttatccaaattggcatgggtgcgcccgccgatgcctgccaagtgattcccaatggcattcaatacgaacgtttctgcgatattcccctgaagcccgacgacggttgggttgatatcggcgcggtggtgcgcatggcgcccatcaaagatgtgaaaaccctgattcacgcgttccatgagctttcctctcgcgttgacaatgtgcgcttgcatattctcggcggtgttgacgatcaggagtatgccgacgaatgctatgagcttgtggaacagttgggtgtgcgcaatcttgagttcaccggccgtgtgaacgtggtcgaatacatgcgcaagcttgatttcaccgtgttgaccagcatttccgaaggccagccgctgtcggtgctggaatcgttcgcagccgcacgcccctgcgtgaccactgacgtcggctgctgccgtgagcttttggaaggcgaggaaggcgacgatttcggcacggcaggcttctacgtgcccccgatgtaccgcgagggcctgagccgagccatggaacgcatgtgttccagtcgcacgctgcgtgagaccatggggcagattggccgtaaccgtgtgaacgcctattaccggcatgagcgcatgcttgacgattatcgcaagctgtatagcgataccgcggatcagttcggattgaatcagttcggattggagcgctgatatggccggtattggatttgaactgaagaaactgttccaccgtagaggcttgatggcgatgctgcgagcctacggctatgccggcgtgatttgcgctggtccgatgctgttgggtgtactcctgcagttcggcgtgctgatcgtgagcagctggtggcaggtgggccgccccgaccgcgatctgctcgtatgcatgatcacctacacgctgcttgcctcgttggtgttgacgagttttctgtcgatgccggtcacccgttttctggcggatatgttgtttgatcacgatgagaagatgattctgccgtcgttctggggttctactggcatcatgctggtggtgggcgcggtgttgtacacggttttcctgctgttttccggtgccacgttgatgcagggcgcgttgtgtttgtggctgtttcttgaaatgatcgtcaactggaatgcgatgagctatttgacggccatcaaggattacaaaagcattctgtattctttcgtggctgcggtgttggtggcgttcgttacgtcatgcgtgttgcttgcgttggcctgccctcctgtggagtcgctgttgttcgcagtggtgcttggctatggtgtgatgctggtgtgggatgtgctcttgttgcatcgttattttccgcaaagtcgtaagcatccgtggctgtttttgcagtgggtcgatcagtttctgccgttggcgttgaccggattgctgaccaccatcggcctgttcgcccatttggtgatcacatggtgcggtccgctcggcatcaaggtgaagggcctgttttatggcgcgccatattacgatgtgcccgccatgctggcgtttttgacgattctgatcaccacggtgaattttgtggtgtcggtggaggtcaatttctatccgacatatcggtcgtattacagtctgttgaatgatggaggcacggtcaaagacattaccgttgccgaaaacgaaatgttggctgtgctcaatcgagaattgcattacacggcgttgaagcaattgttggtgaccgctgccgtgatttcattggaaaaaacagtgctgaacgcgcttcctttaggattcagcgatgtgatgcacggatatttccgtgtgctctgcgtggggtatgccctttatgcggtcggcaacaccgtgatgctgattctgctgtattttaccgattattccggtgcattgacggcgtcggcattgtttgcgggttcgacggttgtgttcacagtaatcggacagttcttcactacgtcgctgttcggtttcggttttctgatgggggcatcgctgttcgccatatatgcgacattccggctcgcctcatacaccgacaatctgccataccgagtgctggggcagcagccgattgtggcgcaaacgaaacgtggacgtttcaccgaactgggcatactgcttgaacatggcgaacagcgggtcgaccaatcattgcatcgctcagggcatgcacggtcttctgacaaggcgaatattgcagaaacggatgtcataatcgggaggaatcgtaaatcatgacatggtggaaccgacgcaacacaaaagccattaccatgcttgtcaagcaaatagcggcattgacggcaatgctgacggtgctttcctgcgccggatgtgcgacttcgtcacccaacgataatgaacaatcgcaatcatcggattcgtcacagacgcatgagcaagtcaagaaaagcgctgaacaaagcatcgacggcgcacacttgcgcgacaacgaatcgttatacaaggtgtatgacgacagcggtgtcgaaaccatgtatttgacggtatcgcgcggtaattcgtcggaaggcaccgaccatagctggagcgaaatcaaccagtattccgttgatgactatgcggccatgggcgttgaccgctacaaggtcaatggtttgctgcaggtcggcgacgaacaaggaccggtttccggggagcttggttttggtgaaagcgcgccgaacgccaccgtgcagatacgtggccagtcatcgagtaaaaacgagcagaagaactacaagatcgagttgaaaagcggcaaaggcaagtggcgtgggcagcgtaccatcgcattgaacaagcatatgggcgaaggtctgcgtttccgtaacaaaatggcgtacgatctcatcaaaggcatcgaccagatgatgggactgcgcacgcaattcgtgcacttgtacgtgaaagacgagaccagcggatcggattccttcgacgattacggtctgtacacgcaagtcgaacagctcaacaaaaccgcattgcaggtgcacggactcgataaaaacggccagctgtacaaagtcaattatttcgaattctatcgagacgaagacgtgatcaaactcgccgatgatcctgactacgatcaagcgaaattcgaagaaaaactggaaatcaaaggcgacaacgaccataccaaactgatcgccatgctgaacgatctcaatgattattcagtgccgatgggcgaaatcctcggcaaatatttcgataccgaaaatctcgcatattggatggcattccaattgctgaccggcaatatcgatacgcaaagccgcaatatgtacctgtatagtcccacgaattcggatacgttttacctgctcgactgggataacgatggtatgctcatgcgcaaggaatacgagatcaggcaacgttccgagggccaaagctgggagaacggtgtcagcaactattggggcaacatactgttccgacgttgtctgcaaaccaagtcgttccgaaccgcgctcggcaaggccgtgaaagacgaatacaagtatatgagcgccgatcgcatcaattccatggtgcggcggtaccgttccatcgttgaaccatacgtacggaagatgcccgactccatgcatgagcctctgacgtcaagccaatacgacacggtggcaaaccaattgcatagcgaaatcgaacagaactaccagacgtaccgaaccgggttcaataagcccatgccgttctatatcggcaagccgactcctaccaacggcaagctcaaactcagctgggatgtctcctatgatttcaacgatgaggatctgcgctatagcgttaccgtggccaaggattacgaaggcaaagacgtggtgttcacacagagcgacctcgtattgccggaagccgtgatggatatgcctggtgaaggccagtacttcatcaaggtgagcgtgcgcaatgcatcaggcgagacgcaggacgcgtttgactattacgtcaccgacggcaacaagatctacggcaccaagtgtttctatgtgaaagccgacggcagcattgtggaggatgccaatgtgcagtgatggtggcaatcgcggaacgtcgctgctgcaacgtatcaaacatcgcgtcggcgaggaattatccgttccaccgcgcacagccaaggaacggttccgtcatgagctcaaatatctgatctcatacgcgcaaaaagccgacttgaacgtgcgtatggcgccgctgcttggcctcgacaagcatgtgaaaaacggcggctatatgattcgcagcctgtatttcgacgattattggaacaccgcatatcaggaaaaagtcgacggtgtgctgctgcgtaggaaataccgtattcgcatctacgattacagcgatcgtgtgatcaaactggaacgcaaacgcaaaagcgacagttggatctacaaggaggatgcaccgctcacgcacgagcagttcgaccgtattcttgccggcgattacgaatttctgcgtgacagcgagtatcagttgtgccgcgagttttatgtggaatgcatgtgcaatgtgatgcgccctcgcgtgatcgtcgattatgagcgcgaaccgtggattcttgacgccggaaccgtacgcatcaccttcgatatgaacgtgcgtgcggcggtcggcggattcgatattttcgactccacactgccggtactgcccgtgcttgagccgggcaagctggtgatggaggtcaaattcaccgagttcctgccgcaagtggtgcgtgatctgctgcccggcaaggcgcaggagttgacatcggcttcgaaatacgtgctctgctacgacaaagcctcgtatttgcggggattcgactactggcaggaaggctggagcgtgccaagcctgtaaagccaagcctgtaatcggctggcatgttgactggcattccagcaaaaacaaacgttacgaatcaaggaagcaggagagaaagaaaccatatgagtgtcaatgacatgatcaaaaagtcggtgctgaaatccttcggccaatacaatgtgcccaaaatggcgctggcgttgctggtggcgttgatcgtcggcatcgtcatttactgcgtgtaccgccgtttctacacgggtgtggtgtattcgcgcagttttgccgttacgttggtgggcatgtgcgtgctcacctgcatggtcacgctggccatcagtacgaatattgtgatttcgcttggtatggtcggtgcattatcgattgtgcgctaccgtaccgcggtcaaggatccgatggatctgttgtatttgttctgggcgatcacgtctggtattgcggcgggcgccggcatgtatgtgctggtgattgttgccggattggtgatgatcggcatgctggctctgctctactcgcgtcaagacaaggggcgcgtgtacattgcggtgatccactatgtgggcgatgtagtgggagatgagatcacgcgcgcgttcggacgcaccgaattcttcgtaaagtccaaaaccatgcgtggcgaacgcacggaaatggcggttgaagtattctgtgatgataaggacatgacgttcacggaacgcgttcgcgccattgagggtgtcgaagacgtgacgctgatacagtacaacggtgagtatcatgggtaatcaattcgatgttgccgcaggcgcgcggctggaatccacgggcagggcgcccagcaacgacgaaatcgtacccagattctctcttgacgacatcaaccaggcgtttgacaacaacgaattctgcttctacctgcaacccaaatgcaatgctgaaaccggcgcaatcgtgggtgcggaggcgttggtgcgttggaatcatccggaatatggcttggtgtctcccggcgaattcattcctctgcttgaacgtgagtcaatggtcacgcggttcgatttgttcatctggcgttccgtgtgtgaaatgctgtcgcgttgggatggggaggggcgcaatctggtgccggtgtccgtcaacgtgtcgatgacggatatcgaggcgatcgatgtggcgcgagtgcttggcgacctgctcgatcggttcagcatcgatgctcgcctgctgcaggtggagatcacagaaagtgcgatcgcacataacatggatgtggtcgaagagaccattcgggacctgcatgcgcgaggcattgccgtgctgatggacgattttgggtcggcgtattcgtcactcaacatgttgaaggacatcaacgtcgatgccatcaaactcgacatgaaattcgttgacctgaatgctgacaatgcggcgaaaggtttgaaaatcatcgaatccgtgatcgacatggcctaccagctgagactgtcgatcattgcggagggtgcgcagaccgccgaacaggtgagcaagctgcgtgagctgggatgcatgtacatccaaggatattatttctaccgtccgctcactgtgggaaagatggaggatttgctggaacaccgcccggatgaccagcatttctggaatatctccaaagatctgatgcatcgcgactaccgcatgtcgacgaacggccgcagcatgctcgaatcgtcgtcattgtcggcgcatatttttgaaatccttaacaagggcgttgcggaactgtcccgactgaatctcatcacgggagaatatcgcaccatcaaacgcgatccgaaacttccggacgtgtatgcggatgattttcatgatttctgccatgcattggtttcaaaacggatcattcatccagatgatgccggagaattcctgaaacacacgcgattgtctgatttgcgcgaccaactattcagtaagggaaaatcggaattcacgtattttagaagcgaggtcgaggcgaaaaccagcgtgatcgcattcggtatgctggtaccccctgattgcagcgaggccaatccgtgggccgtggtgctgatcggattcgacctgtcgctcgacctaatcgccaagaacatgaaggaaatctatcggcaggactccttgacgggattgctcaaccgcaatgcatacgacagcgatgtggagcagctgcggagcgccgacatcggggcggtggtgtgcgtgtatgcggatatgatcggcctgcacgaggtgaacaaccatctcgggcataagcagggcaaccgcatgttgtgtgagttcgcggacgcggcgcgcgcgttcttcggcgatgaccggttgtatcgcatcggcggcgacgaattcgtgataatcagttccgcgcatacggaagcgcagacacgcaagcagctgaactacatgcgtgagcgcttgcatacgcaaggctgcgagatatcagtgggcgtagcgtcgagcgagtcgacttccgatctgccgaaaatcgtcgaacaggccgaaaacgagatgcgccgcgaaaagaaggaatactacgtgcgaggcggcagcaaacgccagctgcgcgggctcaacaaaaaacttgaggacattctggtgcgtaatcaggatatggaatcgttgctgcggcatttgaacggacgctattcaatcgcatgcatggtgaatctgcgtactgactcacagcgtgcgatcatggtgcccgactatttccagaagatgcttgacgcgcatgacggttcgttcaaaagcgcgctgcatgactattgcgaacgattggtggcgccgttctgcaaagacagtttctccctgcttatggattacgacttcattcatgcccgcgtcgagtcggtcggcgtgttgcagtacgggtacacgcgaaacgacggagagaagttcctgcttacgattttcgccgatcgacgttccaaagacgagaccatgtgggtgttctccaaggatgatctgccgcaggtcgagctggaattattcgagtcataaggccgtattgtctggttttatgcgtttttgtgtgatgcgttcgcatattttgtgagaacgctcacagaaaaggttgtgtcgatttccagccgaatcgcaaaatggggtctatgatgagaatcgttggtcatggcaacggttgctatgacacggcgaacaagcacagtcgcttaaaggagacatctatggtctatcgcatgattttcaaccagactgcatacttcggtcgcggcgccatcaaggagatcccgggcgttgccaagtcccatggcttcaccaaggcgttcatcgtcaccgatccggtactgttggaaaccggcaccgtcaagaaggtcaccgatgtgcttgatgaggcaggcatgccgtacgaggtcttcgacaacgtcaagccgaacccgccggtcgaatgcattcaggatggcgttgccaagttcgccgcatccggtgctgatttcctgatcggtctgggcggcggctccccgcaagacacctgcaagggcatcggcatcatcaccgccaacccggagtttgccgatgtgctctccctggaaggcgttgccgacaccaagaacccgtccgtgccgatcttcggcgtgccgaccaccgcaggcaccgcttcggaaaccaccatcaactatgtggtcaccgataccgccaacaagcgtaagttcgtggccgtcgacccgcacgacattccgatcgtcgccttcgtcgatcctgatctgaccgactccatgccgcgcggcctcaaggtcgccaccggtcttgacgccctgacccacgccattgaaggctacatcactccgggcgcctggagcctgtccgactgcctgagcatgcagaccatccgcatgattgccaagaaccttgccaagagcgctgacggcgacgttcctgcaggcgagcagatggcctacgcctcctacatcaccggcatggcctactccaacgtcggcctcggtctggtgcatggcatggcccacccgctgggcggccgcctcggcgttgcccacggcgttgccaacggcattctgctggcaccggtcatggaatacaacaaggacttcaccggcgagaagtatcgtgacatcgccgacgccttcggtgtcgaagatgcctacaccggcgatctcgagacggttcgcgaagaagccgtccaggccgtgcacaagctcaccgtcgacctgaagaacccgaccaccatctccgaagtcggcgcaaccgaagccgatctggaagcactggcccatgacgccttcaacgacgtgtgcaccccgggcaacccgcgtcaggccaccgaagaagacatcctcgccatctacaagagcctgatgtaatgcgaaaactctcacgaatcggcaatcgcatgcagcgaatctgcagtgaaacccgattgtgagagaacatcgctgaaagcattaaaaatcgtggtgcgaaacttcacaaagcattcgcaccacgatttttatatctgcacatatattacggattaatcgaaataatgtaaacaataatccgtgattaccaatcgcaagtattggaattactcgtgcttttcgctccactcctcatcggtgggagtgtcatcgtaccattcgcggccttcctgctcggccaattccatctgctcgttgatccacgccgcctccgcaggattgatatcggcggtgtcaagcaccttctgccataccggatacagcagatgcatcaccggatatagcgcggtgagcagaatctccggcttatgcttgcgcgaatgctgtggatgcgcgtcgaacgtgttcttgaaacgacgcatgtaattgttgaacgacgtgagcgacgtgtccatacggcgggcgctgatgccggcgatcatacgcgggcagtacacggttttcagatccttgcccagcagatgcagcgaaatatcgatatcctcatgcatcacatcggccttgtctcggcacacttcgtcagaaatttcgcgccaagctgaagcgcggaccgccatattcgagccaaacagcaacggctggccgccatcggccttgtaaatacgcttgcgtgtggaattatccccacgcaaaccaaaatggcggctcggcagatcgtaatacatcaccggaccagtggcacccatggcctccgggtcctcagtgaaaatgccggacaccacttcgacccaatccgggcgaatcatgcaatcggcgtcgaaacggcccagaatgtcgccggtggcgtggttcaaaccataatcgcgcgtcggaatcagcccctgctcctcatcctgatgcagcagacggacgggtgcttccgggtggtctttgatgaactgctccaccatggccaccgtcgaatcggtggaacgattgtcgacaacgatcacttcatggggcatcacggtctgcctagtggcattcaacaggcaatcgttgatacgctcctcttcattccaagcggggatgacaattgaaacgttcagcataactaccacaatagctcagcctgtacacgacgcctatcgctacaatagggagccatgagcgacagcgaacagcgaatgaacaatacgcagagcgaaaacggtgcgaacaccagcgaacagcgatgggacctcggcaccctgtttccagccaaaggagatccccgaaaaccaccggaatggctggggcgtgcgctgctatacatcgccatagccattgtggggtttactttctgctggcgcagctggggcaaaatcgaatacctggtgatcgacatcatcgtctcgctgttcatcgcgctcgcggtggagccggtggtggtgccgctggtcaagcatggctggaaacgttcgttcgcgtcgttgttctcgctgctgatgctggccgtgatgctcggcgtgctgttcacactgttcggcaacctgttcgtgcagcagatgatcgccttggtgaacggtctgcccgacctgtatgagcagatgtgccagttcgccagtcaatacgcgaatttccagcttcctgagatcaataatctcggcaatgagattctgaagaacattcaaacgtcgtgggtcactgatttcgcgggtaccgcgctgaatacggtgtcgggattgttttcgttcctgattaacctcatgacgataatcatgaccacgtattacatttcagcggctggtccgaaactgcgtcgtgccgcatgccagtggatggctccggcggctcagcggcgattcctgttcgtatggacggtgagccagagccagatctcgtcgttcctgttctcccgcgccattcttgcgttgctgaacgcgttcttcacaggaatctgtctgatgctgctgcacgtgccctattggctaccgttggcgctgttctgcggtgtggtttcgcagttcattcctatgttgggtacgtatatcggcggcgcgttgccagtgctgttcgcatggggtagctgcggattgtggcaggccgtggcggtgctggtgtttatctgcgtgtatcagcagatcgagaatctgattttcgcgccgaagatctcccagcgcaccatggatgtgaacgatgccgtggcgttcctcgcggtgctggcgttcacctcgctgttcggcgcgttgggcgcgttcctcgcattgccggtggtcgcatccgtgcagacgatcttccgcacctatacaaagcggtacgagctggtcgattccccgctgatggacgatccggtgcctgaaaagaagtcgaagctggtggaaggtgccgaagtactcagcgagcatctgcacaatatgcctcgcgcggtgcagggatccagtgcgcatgtgcctattcccgacgaagtgcggcagttgcaggagcaggcgtacaatatcacccgttccgaggaatcgctggaatcggacgaaaccgtcgccatcccgaagcacgtgttggacaaaacggaacgcaagccattgcagggtcttgagagtgaaaacacatctcaggaatccaacgaaaatccggaatccggcaatgaacggaagaacggcgagtcgcgggaagctgaaggaagtacgaaaaacgcggatgacaatccaagaagtaggtggcgttaatggtactgctgagcgtacttgacattctgctggtcatcgtcggtggcgcaggggtggtctatcaggcggtgtgcattctcatctccctgttcaccaagccgatcaaatttcccgacgcgccgatggacaagcgttacgcggtgctgatttccgcacgaaacgaggcgaacgtcatcggcaacctcattacctgcatccaaacgcagacctacccgaccgaactggtcgacatttggcttgtcgccgacaattgcaccgacaataccgccgaagtggcgcgcaatatgggctgccatgtgatcgaacgcttcaacaaggagcttgtgggcaaaggctacgcgctgacgtatctgctcgatcagatgaacgattccggtgcatccgacccgtacgatgcgttcttcgtgttcgacgccgacaacaagctcgacaagcattacgtcgaagagatgaacaaggcgttccagtcgggattcaagattctcaccagctaccgcaattccgtgaatttgtctgacaattgggtctcttccggttctgcattgtggttcatccgtgaatctcgattcctgtcggcctcacgcatgtggctcggcaacagctgtcatgtagggggtactggcttcatgttctcgcaggagatcatgcgtcgcaataatggttggaaattccaccttttgaccgaggatttggaattcaccatggattccttgctgcacggcgaccgcatcggctactgcggtaccgcgattctgtatgacgagcagcctgtcaccttcgcgcagagctggcgtcagcgtttgcgttggagcaagggcttcctgcaagtgttccgttattacgggccggctttggtcaaacgcgccatcagggaacgcgatttttccgccgttgatttcacgctgctgttgtgtccgttcacggtgatcggtattgcgcgcgttctgctgggactgttgttcgcgacctgcggattcgtgacatggcaaagccagttgagctcgttgaccggttggacgtccggcattgtgacgtcggtgatcggcatgatggcgttggccgcgttgacgattattgtggaacgcgatcagattggcgccaccaacaaggagctgttcgcgtatgtgctgagcttcccgatctacatgttcagttatgtgccgatctcgttccaggcgatgttcgccaagtccgaatggaagccgatcgagcataagggatgacgttcgttcgctggcttgcgcgttcctgccttttcgttttcatttcgatttcctcttatgactggagtgttgttgttccatggatgattcggctgaataccggcatgtgaaacgccgtcgatacatcacggtggcgctttccgtgtcgctcaccacagtgttgtgcgtcggctatgtcgtggccgacattttcgacaagttgccgggtgttctcacattgcaggaagtcgagcatgccacagccaaaacgccgggcaatgccattgcggccgcgacgatggtcggagggcttgacgcttcgaaaaccgtggatgccgttgcggcaaaggctctgatcagccagtttgagacggctgcctccgattttggcggtgaatacgccatcgccatcgccgacgcggctggcaatgtggtggccgagcagaatctcgacacgccgtatacgccggcgtccaccatgaaaacgctgacggcgtatgcggctgcggccacgctcgacatggggtcgacgttggagacgcagacttatttggagcagcgcgaagatggcacttcgcgattggtgctcaaaggcaacggcgacatgctgctcggcgtcggcgaatctgattcggcgcacatcaatgggcgtgccgggctgggaacgcttgcggcaaacacggcccaagcgttgcggcagcggggcatcacttccgtgacgctcgtctacgatgattccctgttcggcaacgaccgttggcccaacggcatcgccgaactcgatccggaccacgtgtactacgcgccgaccgcatccatggccgtggatggcgggcgcaactggaacggtgctaatcctacggatcccgatacgttcagcacatatcccgttttgagcacgcagccggctcgcgaggccgcgctggtgttcgcgcaacgcctgactgagcggggcattgcggtgaacggttccgtgaaacagggagccgttcccgacgggaccagccccattgcgacggtgagctccgcatcgctgaacgagatcatggcgttcatgcttcggcattccgacaattcgctggccgaggaattcggcagactgctggctttgcaccttaacgccggcaattcaccggccggagcggtgcagtcggttgaacaggtactggctcagcgggggatttccaccgaaggcctcaccatggttaactgctcgggactggctgaggattccaaactcaccgcgcataccctgcttgacgtgcagcagcgtaatctgacgagcgggtccggttccgccgccgctgaggggctgtcgattgtaggatttgtgggcactgctgcgaatcgtttgaacgatgctgacgaagctggtcttatccgtgccaaaaccggcagtttgggagatgtgacttccatgaccggcaatgtgtcgcgccataatggcggtgcgttgagttttgccgtgatcgtcaacgatcctgatgattccgaagccgcgaaatcagctatcgacacatttgtggcagcactaccgaagttgtgacgccatggtgtattcgtcacgtttgcgcaagggaatcggcgaactgcgcgccgcgttggaatcggccggtttgggattgcaggatgcccgtttcgcccgtcatggcgagcacgcgcccgatgtggacgctccgctgattatggtgtcctgttccggtgggcgcgattcgatggcgttggctgcggttgctgcgaaaacgtgcgcttcattgggattgcgatgcggggcgattatcatcgaccaccagttgcagcaaggctctgccggtgttgcgcgggcaaccgccgatcgttgcgttgcgttgggtcttgacccagttcgcgttcgtgcgattgacgtacccgactcccgtggcatcggtgttgaggcagcggcgcgtgaagcacgctatcatgcgattgtcgacgcatgctccgacgcttcggccgtgcttctggctcatacgaaaaacgatcaggcggaaaccgtgatcatcggtttgttgcgttccgcgggcctcgatgcggtttgcggtatgaacggttccttcatacgagacggggtgcgttttctacgcccatggctgaatgtgacccgcgaagaaaccaccggcatctgcgaggatctgcggcttgcctggtgggacgatcccacaaatgggccggatgtgggagattcgggtggaaatgagcctcttcccgcgaactatccgctgcgatcccgaatccggcacgatctcatgccatatcttgaatcattcgcgggaagcgacgtcgtgtcgaaacttgcgcttggagcgaggcttgccgaagacgatcgcgcatatcttgacgatgtggcgcaacgcgtgtgcgagcaaggcgtaaccgtgaacaacggcgagataatcatcgacgtgcgtgcgttgcaatcgcaagacatcgccatcagaagacgggtgattgtgcgctcgcttgcggaagcaggcatttcgtgcatggcacggcaggttgaagggatcgacaggctgatctgcgactggcacggccagaaaggtgtgaatcttcccagcggatattcagcatatcgccagaaacacgtcattcgcgtgtgccaagatggtgggcatgcgaatcgctgacgtacaagaagatattgatcacgagctgatcagtaaagaagagattgccgacatcatcaaccatgctgcagcccaggccagtgaagactaccgtggcaagaacccgctgctggtttgcgtgctcaagggtgcggtgaacacgcttgcggcgttctcgcaggccatgagcatccacgcggagatggatttcatgagcttgtcgagctacggttccggcactcaatcgagcggcaagatcaccgtgcggcaggatctgtcgaccgatgttcgcggtcgtcacgtgcttattgtggaagacatcatcgattcgggcgtcacgttggcgtggctcgtcgatgagctcaaaagccgtggtgccgcttccgtggagatttttgcgctgttggaaaagccggcgcgccgtaaggtggatgttcctgtgaaatataagggacgtgagattcccgatgaattcgtggtcggtttcggcttggattatgacgagcgataccgcaatcttgattcgatcgcggtgctgaagccggaagtgtatgaaggaggtcaggcatgagttttcctggtccgggccagtcgccgaataacaacggcggcggcaataacccgttcaccaatccgtttggacgcaataataacgccggcaatggcaacgattccaacggcaagggtgacaagtccaacggcaacggatccaatggcggtccgcgtccgttctggcagtccccatggctgtgggttgtggttgtggcattgcttgccgtgaccatgttccagattttcgccggaaccggttcccagaccatcgacaccaaggacggtctgcagattctcaacggcaacaatgttgaatacgcacagatcgtagacaacacccagcaggtcaagctcaagcttaagagcgactactccgctacagaccctgataccgggcgtatgaagaactacggcaaaaacgtgcagttctactacacgtacgcgcagtccgcaaccgtggtcaaggccgtgcagaaggctgatccggtcaagggctggacggcgaccatgcagcagagcagcatttggacgtatctgctgacctcgctgctgccgttcctcattatctttggtctgttctggttcatgatgagccgtatgggcggtgctggcggcatgttcggtatgggcggcaagaagaacagcggcaagctgctcgaaggccagaccccgaccaccaagttcgccgacgtggccggcgaagaggctgccgtgcaggaagtcgaggaaatcaaggacttcctgaaggatccgtctcgttacaaggctttgggtgcccgcattccgcgtggcgtattgctctacggccctccaggtaccggtaagacgttgctggcacgagccatcgcaggcgaagccggtgtgcctttctactccatggcaggctccgacttcgtggaaatgttcgtgggtcttggcgcctcccgtgtgcgcgatctgttcgatgaggccaagaagaacgctccggccatcatcttcatcgatgagatcgatgccgtcggtcgtaagcgtggcggttccggtatgagcggcggccacgacgaacgtgagcagacgctgaaccagctgctcgttgagatggacggcttcaataacgacaccaatctgatcatcatcgccgcgaccaaccgccccgacgtgcttgatccggcactgcttcgcccgggccgtttcgaccgtcaggtagccgtcgaagcgcctgatttggaaggccgcgaggctattttgaaggtgcatgccaagggcaagccgttcgtgcctgatgtcgatctgcgtatgatcgccgtgcgtacgccgggctttaccggcgccgatctggccaatgtgttgaacgaagccgcattgttgtgcgcccgcgccggtgcgcagctgatcgacaaccgcgccatcgacgaggccatcgaccgcgtgcaggcgggcccgaagcgccgttccaagggcatggcgctcgacgaactgcgcaacaccgcataccacgagggtggtcacgcgctggtggcggctgccatgaacgataccgatccggtcaccaaggtcaccattctgccgcgtggccgcgcacttggctacactgcggtgatgccgactgaagatcgctattccatgtctcgcaaccagctgctcgaccagatggcgtacgccatgggtggtcgcaccgcggaggaagtcgtgttccacgatccgaccaccggcgcttccaacgacatcgaaaaggcgacgaacatcgcacgtcagatggtgctcgactacggcttctccgacaagctgggtgccatcaagtggtccgatgacgaacagagcgaccttggatcgctgaaccacaagtattccgcacgcaccgccgaaatcatcgacgaggaagtgctcaaactggtggaaaccgcgcataccgaagcgtggaacgtcatcaacgagaatcgtgagattcttgacgagctcgtacgtcagctgctcgtcaaggaaacactcaacgaaaaggaacttgcggaaatcttcgctaatgtcaagaaggcgccgaagcgtgaagtgtggctgagcgacagcaagcgcccggattccgacattccgccggttccgattcccgaatccctgaagaaaagcgcaggattgaccaactgatgagcgataccgaagcattcgataccctcttcgacgacaaggcccgtgccgcccatgcggccgggcctgtcggctatgacgaggaaggcgtgcgccaggcagtacgcctgtttctgaaatccattggcgaagacccggaccgtgaaggcctgctcgacacccccgaccgtattgggcgtgcctgcaaggagctgttcgcaggccttggacacggccccgaggaagtgctcaaaaccaagttcaaagtcgataccgacgaaatggtgctggtacgcgatattgaactcttctcggtatgcgaacaccacctgctgccgttccatggcgtggcccacgtcggctatattccgtcgaacggccaagtggcgggcttaagcaagcttgcacgactggtggaactgtatgcccgacgtccgcaagtgcaggagcgtctcacccaacaggtggccgacgcgttgatggaaggtatcgaagcacgtggcgtgatcgtagtcaccgaatgcgatcacatgtgcatggccatgcgtggcgtaaagaaggcgcaatcgcgtacggttacatcggcggtgcgcggctgcatgcgagacgcgacgacgcgagccgaagccatgagcctgatcctgtcgcagcatgcgtgatcggcgcgactgcagcaagtcgaatcgtaaataccaataaccggatataggaggggcaaccggatgaccattgatatgaaatcgattcatgatagtgaccgtacgctggtgatgggcgtgctcaacattacggaggattcgttctccgatggagggttatggctcgatcctgcgaatgcgaaagcgcacggcgaagcgatgatgaaagatggggctgacatcatcgatatcggtgccgaatccactcgccccggagccaaacgtgtcagtgaggaagacgagcaaaaccgcgtgctaggtgctgtggatgcgctgattccggaaggtgcggtgctgtccatcgacactacgcgcgcatcggtggctcgcatggcgttggagcatggtgcgcagatcatcaacgacgtgtccggcggtcagctggaccgcgaagtgccccatgtggtggccgaacacgcggaaagcctttacattgtgcagcattggcgcggttggcttgccggctctgcaggcgacgtgcctgacgctaatacgtccgtgtacgccaatggcgtggtgaacgacgtgtatgacgaactcatgaagcaggtcgacgacgtgcttcaggcaggcgtctcgccgtcacagatcatcatcgatccgggtcttggattctccaaaccgagcgtcgaacataacttcccgctgatggtggcgttggagcggttcaacgccaccgggtatccggtgctgatcggagcctcgcgcaaacgattcgtcggcgcggcgcttgccgatgccggtatcgacgagccaagcatgggcagcaaagacaatgcgaccgccgccatcagcgccttgtgcgccgaatatggagcgtgggccgtgcgcgtgcatgacgtggagaaaagccgtgacgcggtggcgatcggcaatgcgtggcgtgctttcgccaacgtctgatacgcgcggtgggtgcatacgttcgtatgctcttgactgcgtaggcacggcaacgcctcacatcactaaaaccttgggatatgcaaagaaaggctggcatggatcagattcgattgactggcgttcgcgcggtcggcaaacacggagtgcttgatttcgaacatgagcgtgcgcaaacgttcgtcgtcgacgccacgttgtttcttgatcttgcgccagccgggcattccgatgacctgcgggacaccgtcgattacggtgccatcgccaaaggaatagtcgccatcatcgaaggcgaacatgtcgatctcatcgaaaaactcgctgatcgcatcgccagcatgattcttgaatatccagccgtggcacagacgcaggtgaccgtgcacaagccgagcgcgccaatcgtcgtaccattcgacgacgtgagcgtaaccgtggaacgttcccgtgaaacaacttcggctgcatcgcaagtgcatcatgccatcattgccatgggtggtaaccaaggcgatgtggcggccaccttgcgtgacgcggtgcgttcgatcgacggactggcatccactcaggttacgggcgtttcgccgctgtaccgaaccgatgcgtggggcatgcccgatggtacccccgacttttacaatgcggttgtttccgtgaccaccaaactgtcggcaatggaactgctgcgaggattgcagcgcatcgaagccgcacatggtcgagtgcgtaccgaccattggacttcgcgcacactcgatctggatatcatcgattttgacgggcagagcaacgatgatccggatctgacgctgcctcacccccgtgcatggcagcgtgcgtttgtgttggggccgtggctggcactcgagccggacgctgaattgtcgggcgaacatgccggttccgtggcccagctattgcacgaggcatccgatcgcgaccatatcgacgaaatcgctgatgattggatggtgggaagcccgaccggctacggtatcgacgaccttgcctgcgatgccaataatgcgggcgatgcggatgatatggacgaagcgtatggtgcgatcgattccagcgatctgccggaaggaaccgccgcagccaaagcggcggcacttgcttctgcacagctagaacccgcatcgaaacgtgcggtgatctcactcgatagcccagcaaccgatgccgaacagcagttccgcatggccatcgtcacgttggacggcattcccggcaaccaagtcgagggcatctcacccctctaccatgtgagccaactcgacggactccccgacaaaatggctgcggtaatccagatttccacgcgcatgggcgcccatgatctgatcgaagcattaggcaatgtggaagcctccattggcgaagaccttgatctcgacctgatcgacatggaaggcgtggaatgcgatgaacccgactgcaaggtgccgtggcccaccgcacgcaatcatgccgcagtgcttgcgccatggctcgacatggatcccgatgcacgactgggtaaggatccggtatcattcctgctagccatggcccccgatgccgcgcaggtgggactgctgaccgacaattggattatcggaggtacgctatgaaagcgcgcagaaccccttggtggtgctacgttctcgctgccgcattaggattgcttgccggaataggattggcgaaatatggcgagatttcaggttttccattggtcggcgctccatggattgtgcccgtggtgttggcgattttgggattcgtcgtgctttatatggcattgcagatccacaaatacaccaccacagatcccgaaaaacgcgcgcagctgaaacctttggacccgcagaaggcgtttgccacactggtgtcgtgcaaagcgttgggcgtggcaggagcgtcgttagccggctggtatggtgggcagctcatcatgagcctgccgcatggcgaggcaacgttctacagccaagccatcctcgaatgcgcgatcgcggcaatcgtatgcataatcgatatgatcattggcattgtgggggagtggctgtgccaaatcccaccaatcgacggcccggaaagtccgaaaatgaaaacggccacgcaacgcaatcgttacgcggccgcggctaccaaatcagcgacacaatcgaaagtctgattacctcacttcttcagatcctcttcgggaacgcgaagcatcacctcctgtgtcatgcaggcaacaagctcaccatcctgcgtatacaccttcgcctgacccaagccacggccgtgagctgcagtaggcgtatcctgcacatacaaatgccactgagtgatatcaatatcgcgataccaccacatcgaatgatcgatcgaagcgaacgaaataccaggcgtggcaatactcaacccagcgcgacgtaacaccggctccaacatcacctgatcgcagcccatcgccaacatcgcacgatgcataacctgcggaacatcaaccgtgccatcagccttcatccacaccatctgtttaccggaatcattgctggcgctcttcttatcggcacccaacataatcgtgcgcgtcacatgacgaatgtcgaacggcgacttttccgcataatatttggcaaacgaagacttctcggcaaatggttccataagctgcttcgcgctggtcaacgcttccggctccggtacaccctccggcatcggatcggcgaactcaacaccctcctgaccctgctcctgaaaactggcgatggcggtaagaatcgaaccctgagcctgcgtgacatttacacgacgagctgaaaacgagcggccatcacgcagattctccacatcaaacagcaaatcctgacgaatatcaccggcagaaatgaaatagccatgaatcgaattcggcaggcgagacggcgacaccgttttggatgcggccatcatagcctgtgcaatcacctgaccgccatacacgcggccagtggggaaatacaggctttcaccattcacatacatatgattgcggtacatggacggcgtgcccagttgaagcacctttgctaaccgttgcaatggtgtgattgccgtttctgtcatgacactcctcgattcttttgagtcacataggtaacgcttcgttccggattcgagtctacgcaagggcggtaaatttcgccggattgttttgtaacgaatgcgtgagaagcgtgaacggcaggtaatcgtcaaacgattcgcatacggcaaagcgccgcacttcgtaacgaagcacggcgctttactgaaatatggggttaaccggccctgcaattatggacttgcttcgcaagactcattgctaccctcgttcggttgtcgcctcactcaagttgaccctacgaacagtccactggactgttcgcttaacggctagcctgtggccctgcaattatggtcttgcttcgcaaggctcattgttgccttcgttcggctgtcgcctcactcaggccaagcctacagacagtccacaggactgtctgcttaacggcttagcgcgttagcttgcgatggagacggtgggggcgagccgcgtcttcgccaagacgggccacacggttctcctgataggcttggaagttgccttcgaaccagtaccacttggccggattctcatcatcgccttcccatgcgagaatatgcgtggccacacggtcgaggaaccaacggtcgtgagaaatcaccacagcgcaacccgggaagccaagcagtgcgttttcaagcgattcaagggtttcaacatcaagatcgttggtcggttcgtcgagcagcagcaggttgccgccctgcttcagagtcaaagcaagattcagacgattgcgttcaccaccggacagcacgccggtgagcttctgctggtcggaacccttgaaaccgaaggacgccacatacgcgcgggtcggcacttcaacgccggcaacctcgatgaagtcaagaccgtcagacacggcctcccacaggtttttattcgggtcaagaccagcacgattctgatcgacatagctgatctgcacggtctcaccgatcttcagtgagccagacgtcaacggttcaaggccgacaatggtcttgaacagggtggacttacccacgccgttcgggccgatcacgccgacaatgccgttacgcggcagcgtgaagctcaaatcgtcgatgagcacgcggtcgccgaacgccttgtgaatatgctcggcttccagcacagtagagcccagacgcggaccagccggaatctgaatctcggagaagtcaagcttcttgttgttgcgtgcctcctgctccatctggtcgtaacgctccagacgagccttgttcttggcctgacgggccttcggcgaagagcgcacccaatcaagttcgctcttcaggcgcttggcgagcttggcatccttggcgccctggatttccatacgcttggccttggtttccaaatacgtggtgtagttgcccttatacgggtacagctggccacggtcgacctcgcagatccactcggccacgttatccatgaagtaacgatcgtgggtaacggcgatgacggcacccttgtactggtgcaggaactgctccaaccacagaatcgactcggcatcaagatggttggtaggctcgtcaagcagcagcagatcaggagcttccagcagcagcttgcacaatgccacacgacggcgttcaccaccggagcacaccgtcaccggagtatccggatccgggcactgcaaagcatccatagcctgctcaagctgagaatcaagatcccaaccgtttgcagcatcgatatcgttctgcagcttgcccatctcatccatcaaagcatcgaaatcggcatccggattggccatctcttcgccaatctgattgaaacgagccaccttttcagcgatctcgccgaacgccatcttgatgttctcgccaacagtcttggtgtcatccagcggcggttcctgctgcagaatgccgacggtataacccggagtcaaagaagcctcgccattagacacggtgtcgagtccggccatgatcttcagcagcgtggacttacccatgccgttcgggccaacaacgccaatcttcgcgcctggcaggaagctcaaagtcacgtcatcgagaatcacacggtcgccgtaagccttgcgggccttgatcatctggtaaatgaattcagccaatgttgtgttccatccttaagaaacgttggaattccagcgtgttgcatgagcggtcaacggaaactcaatcaaggattccggaacgcaacccacgcacaataccgtgcataattatcccataccccatctacacgacggtatgggcgaaagtcgtgcgctcaggcagtaagcggaagcagcagatgctcatgcaaagcaggacgaacgatattgtcgaaatcaccagattccgggcattgaatcgcaacaaccaaaccctgcttcggcaaaaccgtagtaatctgaccgtacgcaccatccgcacgatatgccccctcataaggcgacatccagaactgatagccataaccgcacgtccaaatattgctatacggagtgtcgatctgcttaccggaagcctgcttgacccacgattcgctgacaatgcgcgtgccatgccaagtgccatcattcaaatagacctggccaagtttcaacatattcgcaagcgacatgtagatcccgccgcctgcaatcggatgaccttgcggatcacattcccaaacaggccaaccctgatccaacttggaaaaaatcgtgccatacaaatactcgccaagacgcatgccggcagcctgctccaacatgcggcccgccaaatcagaatccgcagacgaatagcagaacgtgctgccgggctccacctcaaccctgcgagagaacatgtaccgtaaataatcaggcgcaccaacaccactgcgccggtcagggttcatcaaatacgcatgattgaaaccgctcgacatagtcagcaagtgcctcagcgtgatctggcccaactccagttgcgcatcggagggaacatactcggggaacgagtcgaccaatcgcgaatcgagcgacagcaagccatcttcaatcgcaatgccaatagccgtcgaaacataacttttcgtatgggaataaatattgcgatcctggtcgggaacgaaatgacgttccgcgataatggcgtcgccatccgcaatcgcaacggcttcgacgggcagggactcgctttcaatgagtttgacgaaatcgttgaacatatcgatggcacccatgaaatctcctttgacactgccctacggtgcattacggaaactgtaacgtaaggcggttacgtacgattgttacatcaaacgatttttcctaagcctgtcgctagatggagcgcccgaaaagccgctaggtgccatgcctgaaaaagtcgttaaatgataatgccttcgcaatgatcgatctcgtgctggatgatctgcgcggtgaaaccagtgaatgtggcatgacgctcgcggaacttgcgatccgcatacgagacctcaatgcgctggaagcggaccgtgcggcgctcgcctttgagagacaggcagccttcggaggcgtcgtaggcgccgtctttcgcagtgatcgtcgggttgaacattacgaagatgcgaccgccgaaatcctcgtccacgaatgcaatgatgctcttcgagacgccgatcatgtttgcggccatgccgacgcagccattgcgatgtgcgtcgagcgtgtccttgagatcctgcgcgacggcaagatcctcgggcgtattgagcgcctccgccgacggctggctcaaaaacggaatggacgtcatgatttcgcgctgcatgtgatgtttcctctcgctggttcctttgctggtctgccaacattgtatggcgttattgcgatccgctgggtgcgcctgctgtgggacacgccgatccgcaccggcacgcgccgctactacgacaacttcctctacgcgttcgcgttcctcgcgctcgcgggcgaataccgcgtgtggtgaatatggctgaaacaaggagttggacacaatgaaatcgacattgcatatcaatccgttgttcggtgaaggatgcgtgctgcaatctggcatgccggtgaggatctggggtggtggccgccccggttccacgatcgaggtctcggtcgcggaacggcgtgccgatgccatcgtcgacgccgatggcgcgtggacggtcacgctcgaaccgttggacgctggtggtccctatcgcatgacggtcagtgaaacgtcggaagcggcgacgcgggaatcattgagccatgacgtttatgcgggcgaggtgttcatttgcgccggacagtcgaatatggaatatcagatggaatttctgcactggcgttatccgtccgaattcacgcgtgaagccgactcgctgctgcgacattgcaaagtgccggtcagattcgatttccacgggccgcgtcatgaattcgatgaaccggtacaatgggttggcgctgcatcggatgcccttgatgagtttactggaatcggctacttttttggacgtatgattcgggaatcgttcggtgtgccggtcggtctgcttaatatcacgctcggcggctcaccgatcgaatcatggatggatgaggagacactcgctgcatggccgaggatgctcactgatctggcaccataccggaatgatgatgaagcccgtgtgcgcaatgagtctagcattgaggcccgcacccggtggcatgaagatctgcgtgtgcgagaagtcaaccgatggaatgaggatgcggaaaccggaaccgtgaacctgcccgcattcctgtcggatgccgatcctcgtctagctggggtccgcggtgtgatccgcttgtggcgtacggttatgttgccgacgtatgcggttggacggcctgctgtgctgcacttgggggcgatggttgattcggacatcacctatgtgaatggtgttgaagtggggcggtccgagcaccagtatttctcccgtgactacgttgtcccggagaatgtgctgaaggccggccccaacgatgtagaagtacggctggtgtgcgaacgcggcacgggccggttcactcccggtaagcgcatgcatctggatgtgggcgatgactcgttcgatctgagcggagcttggcggtacatgatcggtgccgaaatcgatgaggattgtccgacggaagattccctgcagtggaagccattaggcctgtacaacggcatgaccgcgacctgcgccgggtacggcgcccgtgcggtgctctgatatcagggtgaatccaatactggtgatgtggccgatgagtatgggcatatgcttacggcgatgatcggctgctggcgacatgcttgggatcaagaacgattgccgttcctgattgtgcagttgccggtattttcaatcgacaatgtcgaggatggtggatgggccttggtgcggcagcatgaatggcaggtgtcgaagaccgttgatgatgtggcaacagtggttgcgctcgatgccggtgaatggaacgacctgcatccgtggaacaagcgtgtggtcgccgagcggttgttctatgcggcctgcggtcttgtctatggtaaaaatgacgcaccgaaatcacctgagccgaagtccgcggtgttgacagacggtgagctcgtcatcgactttgcaggtggtccgttatacaccttggacggggacgaaccgcgcgaattcgagcttgtctgggaggacggctccgtgcatgccgtctccgggcgcgttgaaggcgacaaggtcgtcattcgtgtgccctggcgtaagccgacatccatccgatatgcgtggagtaatgcgcccggtcgtggtctactgtgttcggggaagggtatgcctgtgccaccgttcgccatgccgattgagtagagaagacgcgccgaaaccgaatgttcgccgttcgaccaagtcgggatgtggccgaacgacgaacttgctatcggatgtcttgagcaattccaagaggtagcggagcgtatagaagtctgttgggcagaatgatcggttcgacgatttcgccgttcgccgaatccattgcgtaaccgagccgttcatgaaaggaatgaacatatgagaaacttcatcttccacaatcccgtcaagatctatttcggagaaggtcaggtctcgcatgtggccgaggaggccaggtctcgccccggtgccgcgtgctgctggtctacggcggcggctcgatcaagcgcaacggtgcctatgacgatgtgacggccgcgctgcgcgaggccggcaacgaggtcatcgaactctccggcgtgaccccgaacccgcgactcgacaaggtcttcgaaggcgtgaacctggttcgggagcacggggtgaacctgatcctggctgtcggcggcggctcggtcatcgacagcgccaagttcatctcgctgggttccggcctgggcgaggacgaggacctctggtacgactacgtcgaaaccggcaagcccgcccccgaaaaccttgtgccgctcggcgtggtgctgaccaccgccgtcaccggctccgagatgggcgacgtggctgtgctcaccaactgggcccgcaaccgcaagctcggctacacatccttcccgctgacgccgaagttctcggtactcgacccgacctatctgctcaccctgccggctgaacagaccacctacggattcgtggacatgttctgccacacctgcgaacaatatttctcgctacccagcgacgacaatctctccgacgagatggccgaggccatccaacggcatatcctgcgctcctggcgcgcctgccgtcgccatccgcgcagttatgaggcccgtagcaacgcgatgtgggattccacgttcgcgctcaaccgcgtcatctcgcgcggcaaggaggaggattgggtcacgcacggcatcgagcatgcgctctccgcctacttcgacatctcgcacggcgccggcctggccgtggtccatccgcactggatgaagtacgtctacacctcacgccccgaagccaccgcacgcttcgcccgctgggcggtgaacgtgtggggcgtggactcgaccggcaaatccgagcgcgaggtggccgaggagggcatcgagcactacgtcgactttctgcgtctggtcggtgccccgctcaccctgtccgaggtcggcattccagccgatccggccacgctggacaagctcgccgaccatgccggcgacgtcggcggctcctaccgccgcatcacccgcgacgacgcgcgcgccatcctcgccttgtgcgtgacaccggtcgtgttctgaggatgtatcaaggtgtatcgagggatggaggcgccgaagacttgatatccacacctgccgtatacacgtctatgaccacacattttgccctccacctgtacatcgacacgcagccaccacggtgtacagggatggcaagccgtacatggatgtgcgatgaaaggcggcatctccgcttcggtggcggggcaggctttcatcgccaccgaagccgttgtcggtcacatgattcggcatatgctaatgtcgagcggccttattaccctgctctcggcggggtgcggaagtccttgaagcgttggattgcgcttccataccattccgcggcggaatcggacttggcataacggtttggtttcgccgttttgctatggtatctcggctgtggcatggtatggggcaccgttatcaggtgctatggtgttccgtatcgggatcgggtggtacggaacaccaatcgccgagtgttgcagaacctgtaccgcaaaggggcggccttccggttgtgatttcgatcgtgaacagccttgtcgccccgatgggaggcgtcaccgttggtggccgcatattatcggggcgtcaaccgcgtgcgaacagcgtcaacttggcgaagaggtcctcgagaatgaatcgactgtcaatgctgtcgtagatgcgtatcgttgggcgagacggtatgaaagcagtggagctgtccggcttgaccaatggtgccggcgcgtaatggaattcgccgcaatcatgcttcatcgccaagccgacggcgggcgaatctcccaatgaccagctttctcccgaagtccagaacgcgaaatcactgtcattgtatttcacgagattgtcgaacaggaactcgccgatagcgcccgcatcggcaagcttacattgtagttcggcaatgctcacattcatcgtacggtagacctgataaggcaccagccagagattcgcaccactggtcagcaccagattggcgccttccacgtcgttgccggagttgaattcgcgaatggcttcctcatcgttgccgggaagctgcgtgccgatccagatgatggtcatccggctgacgatttccgggtgcagcttgatggcggcggccacgttggtgatggcgccgaggcacagtacgaacagcggatgggtatcggcgctcagagcttcgtcgagaatcgcgcgcgaagcgggggagaggtcctcatcagaggcgaggtgcagccccgccagcggcgtgcgggcgccttcgagtaccggtacatcggagttcagcagttgaacaaccgtggacgcggtgcggaagctgcgttccatactgcccgcttcgttgaaatgctcggcgcaaatcgccttgaccatgaacttcggtgtcagcaacgcctgagcgatagcgaacgggtcgtcggcctcgcaatcggcgtcggtgtcgatgatgacacgaatctgcttatcatcacggactgtgaaatgaaaagtcatcaatgttcctttcctgatggtgatatgcgatgaggctgctggccctcgtcgttccgacaacctcatcgtgtgactttatcaaccgcgccagcgcacgtactgctcgtacacctgcggggttggttcgccggtcagtgtggtctcgactttgaccggccacgtcggcggttcggtctcgccggacagcacccaagcggcctgacgggccgcgccgatcgccacgtactcgtcggtttctggcagttcgacgtccatgccgaggatcgcgggggccagcgcgcgcacggccgcgaacttggttccgccgccgatcagcaggatgcgcttgacgtccacgcccagacccttgaccagttcaaggcagtcgcgctgcgagcacagcagaccctccacgaacgcgcgggcgatgttctctcgcctggtgttcgccaacgtcatgccgtacagcgccgccgtggcgtccggacggttcggggtgcgctcgccatcgaagtacggcaccagcgtgatgccgccggcacccggttccgcggccgcggccagttcggccagttcgtcgtagtccacgccgagtgcggcgcgtccggcatcggagatgcgcgaaccgttgatcgtgcaggccagcggcagccaatgtccggtgcagtcggcgaatccggtcaccgaagcggtcatgtcgtaggcgggcacgggggagatggccgcggccacgcccgaggtgcccagcgagatgctcacgtcgcccacacccatgctcaggcccagcgacgccatggcgttgtcgccgccgccggggccgatcgggcagccgccctccacgtccttgccggcgatggccggatcggccacgtcgccggtctcggtcgggccgagcacgcgcggcagcacgatgccggcgatatcctcttcgccgcgtcccagcgccatcgcgagcaggtcacggcggtattcgttggcggtcgcatcgaagtacgcggtgccggaggcgtcggaacggtcggtgaacagcgcatccaggttcgccttcatctcctcggcggtcgcgtcctcgcccagagggccgtggccggcgatgcgccagctcagccagtcgtgcggcaggcagatcgcggcgatgcgtgcggcgttctccggttcattcgcggcgacccacgccaccttggtgatcgtcaacgaggcgaccagcgaggagccgacggccttgacccagcgctggcggccgcgcatcgccggatcgtcggacaggtcgtcctcgctgccgtcggcggccttctcggcctcgcccagacaggcgatgagcacgtcggcgttcgtggcggaacgggtgtcgttccacagcagtgcgtcacggatcacgcggccatggtcgtcgagcagtaccatgccgtgctgctggccgccgaccgccagcgcggccacgtcgtcgagcctgccggcctgttccgcggcctcctggaacgcctgccaccaggcatcggggttcacgctggtgccgtcggggtgcttggcctgcccgaaacggaccatctcgccggtctcggcgtcggtgacgcgcaccttggtcgactgggtggacgtgtccacgccggccaccagaactctgctcattgtgcctccttgcaacatgccgccaaaaacgtcgggctgatggcgtttggccgaatacggtcgccattatacgcaaatagtttgacgaatgaactatactggtgtgtgtaccattttcacaatgttgtgggaggcacgccggaggcgatgaagcaccagaacacatagaggagagctacgtcatgactacgctgcgcagaatcaaccaggacgatctacgcaaccacaatctttcggtggtcatcagcacgctgctgcgcgccgccgaaccgatgagccgcgccgaactggccaaacagacgggactgaccaaggcgaccatgtccctgctggtttccatgcttgtcgacaacggcgtcgtgcgcgaggggacgccgagcgtacaatcctcctatgggcgccccagcacgccgctgctcatcgtcggaggccgatactgcggcatcggtctgcaggtgaatacggacggctacggcaccatcgtgctcgacctggacggcacggtggtcgcggaacgctgggtcgatgcggatatgtccgacgtggacgccgacgacatcttctccgaactgaacgccctgtcacttgagcaggaacggctgctggccgaccgcggatacaccgtgacgggtaccggactggcattgcccggcctggtcacggatgacatgaggctcctcatggcccgcaacctgggatgggaacagttggatctcaagcggttcgacgtggtgcggcggctggatgcgactgcgggcaacgaggcgaatatggcggcgctcgcgcagattcccggatacgccatgcaccgtgaggacgacggcatcgtggaacccaacgcctcattcatctacctgtccacggacgtcggcatcggcggcgcggtggtccgtggcggacatgtggagatcggcgaccatggattcggcggggaactcggccacgtgtcggtggagctgcggggaccggtgtgccggtgtgggcggcgggggtgcctggagacctatgccggccgcagggcgatggtggagtccgcaggcatcgccagcgggtcggcggccgcgcggcgcgagtcgatcaacgagctgatcgaacggtggcgtgatggggacgtcaaggccgcggcggtggtggacaaggccatcgaggccatggtctccgccatcgcgtcggcgatcaacatctgcgacgtcgatacggtgatgctgggcggcgtatggtcgcagttcgggccggagatcgcctcgcatatgcagggcatgatgcggcgccaggtgcttggataccccgaggtgcgagccaaggtgctgatggccgacgtgacgtccaaaccggcgttgatcggttcggccgccatcggtctgcgccgcttcatcgacaatccgatgcggttcgtctcgaccgactgacggtccgcacacggatgcacgcgtgttccaacctaggcctataacgtcgggggcgcggcaagaggagccgcctgatacagtggcacgtggcgattccgcccgggctgcgcaggtcaaggatcgtccgcgggtctccccgtgttcatgccgtgcgcagtcaacagggaacaggagcatcccatagccgaacatcctcaacaaccgaatcatcacaccatgcccgccgtagggaaaacgtcggacatggccgacatgtcggcacggagggatgcctccggtcccgccggattgtcgtccccatcctccggcggccgggccgcggaccgtcgttggcgctggaggatggggacgacatcgccgtgggcgccgcgttgggcgtggcctgcggactggtgttctggctgttcaacttcgcctacgcatggctgtccccgatcatcggcggcatcctgcccggactggccagcatcctgtacccgctgtggtatttctccggcacgttggccgtcatcatcctgcgtaagcccggagccgcggtctatgtgaacctggtgggcagcgcggccgagatgctgctgggcaaccagttctcgttcgggttcgcgtccgcggcgctgcagggcgtgttcgccgaactgccgttcgcactcacccggtaccgcgtgttcaacctgccgatctccatgacgtccggcgccttggtggccttggaatacggcgtgtacctgatgctgttccggtatcagggcgtatcgttcctcagcccccgcggcgtcatccatatgatcagtgaattggtcggcggcgtgctgatcgccggcctgatgagctggtatctgtacagggccatcgccgccaccggggcgttggatcgtttcgcttccggacgggcgcggcgcgacgatgccgcccgtcgcgggtgaccgctgtctccggtcggcggttgtcaggatgccgcccgttgacgagcatccgggcaaacgcccagcggtttgctagactatagggccggccacgaaccggcgtggggctgtagctcagtcggttagagcatcggactcataatccgccggtcacttgtccgatcagtgccaccagcaccgtcagcccggtgccgagttgcggcgacagccaggagatcatcagcaccacaacggcgccgagcaggcccccgatccacatccacggcggattatgcccgcggatcgccttaccgagatcgaggccatggtcacggaacacgaccacggcgcacagcagcacaaatcccaggatgaacgagacgaccgacgccttgatcggcgatccgagtgccgtacccagtcgtcccagcatggcggcttgcaccgccaacgacatgccgcagagtatgcccagtccacgccatagccagatgcttggcgagcgggttcggttcgtggagcggccgtccgcagggggtcgcaacgtgtccgcggacagcattgcggggggtgcgcaccgctccgtgccgcgagccggacgggttcggaccgccgaacagcgtcttggcgtcggcggcggcgaccgccagcagcacgctgaggactgccagcaccagtccggctgcgcgtgccatggtcatcggatggcgagggttgcccagccagccgaactggtcgatgagcagtcccatcgtgatttgccccagcaccggcatgagcacggtctgcagactgccgagcctgggcagcggcaggatgttcccggtcatgaagatcacgccgaagagcccggcgaaccacatccaccaggggccgtggagcgccgactcaggtaccagcgggtacggtccgagcagcagtgccgcaatcgttgtggctgccaatcccacggtgaatgacaccagcgacgcgcggaacggtgtgcccaacgttccgcgcagtcgcgcgttgacgacggtctgcaacggcgtgacgattccggtgagcactcccagcgcggcaagcagcatatgatcccctttcgtctcggcgacattgtactcacgacgccgatttcgggggtccagctgtgcgctgggacgcggcggttcggattgggagggaaggcatgcatggcttcgcgggtgatgcgggaagatgcaggaagatgcgggaaaagcgggggatacgagcaaatattaagcaattgatgtctgggtgtccggtttgtcgagacgtctgcttttcataggttcccggcctggccccgcctggggggtggacagtgccgcaaaacgcaggcaccaagatacggaagaagaggagtcgtaccatatgaacaacatgccgcagcgtttggtgttcttcgccctgggcgtcgtcatcaactcgttcggtgtggcactgatcacgttgggcaatctgggcacctcggccatctccagcgtgccgtacgtgtgcagcctgcagttccccatgttcagcttcggcgtgaccacattcatctggaacatcctgctgattctggttcaggtcgtgctgctgcgccgcgacttcaagccctcccagttcctgcagatcatgatcaacgtgctgttcagcgccatgatcgacgtaagcatggccatcctcggtgttctgcaccctaccatgctgtgggagcagttcctgtgcatcggcttaggctgcgtggcgttggccttcggcatcgtcatcgagctggcgccgaacgtggtggtggtgcccggcgaaggcgtggtccgtgccatcgccaaggtcagcggcgtgcgcgtgggcacggtgaaggccgtattcgacatcacgctgatcatcatcgccgcggtgctgtcattgatcttcttccacgggttgcgcggcgtcggcatcggcacggtgatttccgcggtgttggttgggccaatcatcaacatcgtcaatcgcgtcttcaccttccagcactgcatccaggcgctggccttgtcccgcgacgggcgttgacgtctgaccgtccggtcgccacagggccgggaatggtgacgcggaaccgatcgagcgaattgtcgatgcgcaccggttcgcgcgcctcgttccttagcgcggcgccgatgcgcaggtatccggtgccgtcgtcgcgcagcacggtgccgccgtccggatacggggtggaccgcagcagcgagaacaggaatgcgttgcgcgtggacgttgacgcctcatgggtgagccgctgtttggagaccgcgccgaacaggccgcccaggttcgagacctcgattcggtcggtgaacacgtccacatgcacgggcgtgccgagcgcgtccggggagtagtcgcggtgggtcaacgcgttggcgatggcctcgcgcagcaccagttgcggatacatcggcggctgtggcgactgtgatggttgcgcgccggaatcggcgccgcctgggccggacgtccataccatcagcgaggcgaccgcgtcatcgatcatgatcgggatcgggccggtgatggtttcggaggcgacgagccgtgcgtcgccggtgaacacgtcgtcgcgtgaggtaccggggtagacggcgatggtgacgttgagccggggaaagaacttctgcggataccggccgacggccaacagtcccgcaagcgtggggcgcggcacggatgcgatccgggtctcctcgtccgtgtcggtgtccgcgccgatatccgtgtcgtcttccctgaacgcggttcccgccgggtcgcaatccgcggcatgtttcgcggcatgtttcacggtgtcgtccgcggggtggccggttggcatgcgtctcaggatgcgcaggtccagcatcatgtccatgtcggaacgctccgcaaagacatgcggatggcggtcgcgctcgcattcgagcagcgcgtggacgagcgtgggattcaagtcgtcgagcgtggcctctggcacgaccgcgatgtcgtgctccggctggcgttgctcatcaagcagacgatcgacctcgtaggaggtcatcttgcggtcgccgtcgccggtgcggatgtaggagccgtcgtgcgggccgaccgaggagacgaagcagggcttctcccgcggcagcatctcgtcgatgacggcgaacaccaaattcgcgccctcgaacgggcaggtcacgatcacgggccggaccacgggcgtgagcttctcgcaggcctggctcaacgcctcctgcatggcgcgggcgtcgaagccctcgaccggcgtgaaccccgccttctcgctcagccccaggatgatgtacccgccgttgccgttggagaacgcggacagcgtctcggtgatggttgagctgattctgcgtttgcactccttaacctcgcattgctgcgtgtcgttgccgatgacgcgcagcagttcgatgagctcggtcatcttggccgtgtagtcgtcgttgtccatcgcgcctccgggagtgtgccgttgccacctggtgacgtctgtactccggccgccgcgggctcctgccactatcctatgccggcggcggcatatgcgtggcgatgacttgcgcgggatcggtgccgtccgtgagtcggatatggtggggcccgcgacgggatcgttccccgtcgcgggccccaccgttaccgtatggtcgcgtggttcgcgggaatcagagcaccgcgtccatcgcctgcttgagatcggcgatgatgtcgtcggcgttctcgatgccgcagctcagacgcaccagatcgatgccgacgccggcctcctccagctgctcctcggtcagctggcggtgcgtggtgccagccgggtacagcgcgcagctgcgggcgtcggccacatgcgtggcgatcgagatcatccggaaatgatcgagcagcgcggagaccttgtcgcgtccaccggacacgccgaaggagatcacgccgcaggtgccgttcggcatgtacttcctggcggtctcgtagtacttgtctccgggtagaccggggaactgcacccagctgacgcgcgggtcggcgtcgaggaactcggccaccttctgcgcgttctcgcagtggcgctccatgcgtactcccagggactccaaatgcatgcccatgatccacgagttgattggtgccggtgttgagccgaaatcgcgcataagctgtgcggtggctttggtgatgtaggcggccttgccaaaatctttggcgtaggtcacgccatggtaggagtcgtctggtgtggtgagtccggggaatttctccgcatgagccatccaatcgaagttgccggaatccacgattgcgccgcccacgcaggagccgtgaccgtccatatatttggtggtggcgtgcgtgacgatgtccacgccatactggaatggatgacaattgactggtgtggggaacgtgttatcgacgatcagtggcacgccgtggcggtgcgctgcgttcgcgaacttttcgaaatcaagaacgatgagcgccggattggagatggattcgccgaagaccgccttggtgttcggctggaatgccgcttcgagttcttcctcggtgcagtccgggcttacgaacgtgcattcgatgcccattttgcgcatggtcacgttgatgaggttgaacgtgccgccgtagattgcggaggatgcaacgatgtggtcaccgttgttgcagatgttgaagagtgcgaaaaagtttgcagcctggccggatgaagtcagcattgcggccgcgccgccttccatttcgcagattttcgccgcgatggtgtcgttggttgggttctgcagtcgggtgtagaagtatccggattcggataggtcgaacagtcggctcatctgttcgcttgacttgtatttgaaggttgtcgcctgaatgatcgggggtgtgcgggattcaccgtttccaggctggtagcctccctgcacgcagatggtgtcgacgtttttgctcatggatttccttctttcgattgggcgcttcattgcgtagcgctgcggtgcaacaaacatgctcaccttatcactgagttgataattggctattcttcaatggaaacgccgaatagttcactgaattgacaaacttaggaaattgattttattatatacatcaagacaggcgggaatccgcttgacgggaaaagcaatgtcttgcgaaagtaaaaactaatagcaaaggagcaacccatgggtctgtgggatatcgaaaagattccgtatgtcggtcgtgaaaagggaccgcaggagggtctggctttccattactacgatgccgacaaggttgttgccggcaagaagatgaaggattggctgcgtttcggcgtcgcttggtggcacactttcgatcaggagctggtcgatccgttcggcaccggcaccgcccagcgtccgtggtacggcaagtactccaatgctgaggatgaggccctggccaaggtcgattacgccttcgagttcttccagaagctcggcgtcgagtacttctgcttccatgatcgtgatatcgctccggaaggcgataccctgcgcgagaccgacaagaacctggataaggtcgtcgacaagatcgaagagaacatgaagtccaccggcatcaagctgctgtggaacacctcttctctgttcaccaacccgcgcttcgtttccggtgcttccacctccccgttcgccgacatctacgcttacgccggtggccagctgaagcattccctggagattgccaagcgcctgggtgctgagaactacgtgttctggggtggacgtgaaggctacgagaacctgtggaacacgcagatgaagcgcgaacaggcgcacatggccaagttcttccacatgtgccacgagtatgctcaggagatcggcctggacgctcagttcctgatcgagccgaaggccaaggagccgacgatgcaccagtatgacttcgatgcatccaccgccatcgccttccttaagacctacgacatcgacttcatgaagctgaacctcgaaggtaaccacgccaacctggccggtcatacctaccagcacgagatccgcaccgcccgcgaggccggtgtgctcggctccctcgatgccaaccagggcgacaagctcatcggctgggatatggatgagttcccgaccgacctgtacgagacttccaccgtcatgtgggaggtcctcgccgagggtcagatcggccctcacggcggcctgaacttcgatgccaagccgcgccgcacctccttcgccgccgaggatctgttccgctcccacatcgcaggtatggatgcattcgctgcaggtctcttggtcgcagccaagatgcacgaggacaaggtcatcgagaacctgcaggccgagcgctacagctccttcgattccggtatcggcgcgaccgtcgagaacggcactgcctccctggcctccctcgaggagtatgctctggatatcccgcagtccaagctcatcgaagccaccaagtccgatcacctcgagtccgtcaaggccacgatcaacaactatatgatcgacgcattggccgaggcgtgagccgaaatcgagcagtggttgggtgcgcgtagcgctccgaaattgccggggcgggcgtggcccaacaaggagttttcgctaggactctgatttatcgctggattaaacagcgaggctcggttgcaacaaaaccgaatatggtgtgtcgaagcgttggtgctccggcacaccatatatttttacctcatccttccttaaatttccttcgcatacaagtcgtctgccggctatgtcgtcggtggacgacttgcatgtgttatgaaaacaagtcgaaaatttcaactattcgcaatgatacgatgtggaaaagcgtttctgaataaggtgtatttatgaccgcaactattaccattaccaatcccattcttagtggaatgaatcctgatccgagttggatttgggatgatgagttccagcgaattgtgttggtgacttctacttttgagcttgtcccaggtcttcccatttacgtttccgaggatatgacgtgctggaagcatgtgtcgaatgtgatagatgctgacttggcaaggcgcctacttattcctttcgtggatgattcgggcggtgtctatgcgccgacgctgcgcaggattcatggcaaatatgtgattgcatgcaccattgcccgtcttgatgatcgccgtgctatggaaggtggttgcacagaaagcgagctgatgcggttccacgacgcggggggcaattttatccttgaagcggattctatcgaagggccatggcgtggcccgttctggattgagggcgctgaaggcatcgatccagacatcttcgaggacggggatggcaacgtgtactggacccagacccgtcctgcggtcaatccgcaatgggaaggccagaccgaggtctggacccaacgcattaatccggagacttggacttttgtcgatgacggtcttcctgcgggatcgggcaagacggtaatatggcgcggatacggtatggaatcggtgtgggctgaggcgccgcatctctatcgcgtgggtgattatgtgtatctgatgaccgctgaggggggcaccagtttcgaacatagcgaaatggccatgcgcatctatgcaccgcatggactgcttcgggcgttcgaagcttacgaacgggaagtatccgaattgggtgagtgcattccgcaggttcgtgacggggaacgctgctatcttggcaccgcaatccgtgccttccacgcggataagaagaatccgattctcacccaccgacatctgggtttgtcggaaccgctgcaatgcgtgggacatgcggacctgttgcttcatccggaactgggatggtggctggtgtgtctcggcgtgagggagacacggggaaagcgtgacggcgaattattgagctacttgggaagggagagctttgtcgctccggtatcctgggaacataatccggccgattggaagctggacggcaacggtgcatcatatacgcatgaaggtgaccccggatggccagtgacttgcgctggtcttggccgcttggccgacgagatcacggttactactgaagacgatggcatcgccatcgagcctagggtgaaatcctcgctcgccggtgacgtggaacctgcgctggtggatgtggctgatggctcgacgaacgatgtggtggtgcgcgatgagcgtgatgtcagctaccgcagaatagcgaaactgccgacgctcatgccgattcctatgtccggttctttagtgatccggcagaattccacacattacgcggtgttttcgatgcatggcacggatgtgcgctacgagatggtaaatggagacgattcgcaagctgggtctgttgccgtacaggctgacggagtgcgtccggcggtacttttcgatgacaaccgcttgtcggtcatcgtgactggcacgcatggtctggttgattctgcgacgttcgtgtgtcaggggcaggtcctgctgagtgtcgatgctcgtttcctcagcaccgaatgggccggtgggttcgtcggttgcatggccggcttcatggcataggttctacggaatttcaggatggttcactgctggtgttccgacgggccgtcttagaacgagttgaaaacgggtcgaaaggctaggagcgctgtgttctccctccggttgtgcctgtgaggtttgccccgctgattaaccctcgagttgctgtgtgctgttgcgtaccactagcgatgtcggcatgatgatgtgcggttggatcacgtcgtcggtggacagcgcctcgaccagcatgcgtacggcggcccttgccatatcttggagcggctgccgtacggtggtcagcgccgggccaaggaatgcggcagtctgcacatcgtcgaatccgaccacggataaatcctcgggaatacgtaatcccagctgccttgccgcctcgtagacgcccatggcctgcagatcgctgccggcgaagattgcggtcggacgatttggtcgtttcaacagggagatggactgtgcgtaaccgccggaagtggtgaaatcgccttcggtgataagttcgggatcggtttcgattccatgttccgcaagcgctgatgtatatccgtccagacgtgctttggaacacatcatctcctccggtccggtgatgatgcctatgcgggtatgtccgagtgcgagcagatgcctggtggcgattacgcctccggtccagttgtccgcttgcaccgacagcgtgtctggatctggattaccgaatggatcgaacaagacgaagggaatacctctggaatgcaacttgttccgttcgatacgtgtcaggttcgagaaaacgaggatggcgccgttcgcctgcctgcgaagcatgttgtcgatccaggacgagtccgggtgctggcgattgccgccttcggtggtgatgacgttcaaatcatgcaacttggcttcgcgaatggcgccacggagtatttcaagggcccaaacattatcgaaatcttggaacacaatttcgataattcgttggcttttcgtgcttgtcgctttacgggaatacccataccgtttcaacaccgcgttgatggtttgccgcgtctcttcggaaacgtcggctctgccgttgagcgccttggatacggtggaaagggaataaccggtctctttagctatgtcagagagtcgtaccgtagctttttttgccgtattgcgcatgagtcactccttcttcttttcatcatatccgaaaatgcgaacgaaagtttcggtttacgtttttcgaaactttcgatatgttggcaatgcttaaaaacgttgtaaaatcaacgaaaaatagttagtttcctgattttacaaaaaacttgactttgtgtgatttgtttcggtagtctgtaggtacaacgaaaacggaatggaaattttcgaagggagtcaaaggctgattctctgtctgccaggggagctgcagcagcattcgttgcggtcatgcttcccgattcggcccattcgagagaaatcgttcctgtcgttgccatcattttgtcgatgatgatttggtcaataaggagaagacaatgaagttcaaaaccattgcagctgccactcttgcggtggcgaccatgttgggcatgggtgcctgcggctccagcactggtgccaaagacgataagaccattacgttctggcataactcaacagctggtgacggcaagcagtattgggaggatgtggccaaagcgttcgagaagaagaccggtgtcaaggtccagatccaagccatccaaaacgaggatttcgaaggcaagctgaccaccgctatgcaggatcccgcctccggcccggatgtgtacatgacccttggtggagccaagaccaaggacatgattgacgccggacaggccatggacctcactgataagatcagtgacaccgtcaagaagcagatgtcttctgcgctggagtccatgacctatgacggcaaggtctatggtgttccagtcactgtgcagcctggtggcatctggtattccaaggatctgttcaagcaggctggcatcgatgccgcgccgaccaccttcagcgagctgaagaccgatgtacagaagcttcgcagcgctggcatcgatccgatcgcactcggcggcaaggatgcttggccggtcggtcactggtactactggttgtccatgcgcgaatgctctccgaaggcctacgccaagggcgtcaatgacaaggacttctccgactcctgctggaccaaggccggagatgatctgaaggatttgttggatgcgaatgcttttaacgaaggattcctcaccacgacggcccagcagggcgccagctcatccgcaggtctgctggccaatcataaggctgcgatggagctcatgggcacatgggagcctggagttctcaaggacctgactccggacaagaagccgctggccgaccttggcttcttcgccttcccgaccgttgacggcggcaaaggcaaggaaggcgctttgatgggcgccgtgaccggcttctccgtcaatccgaaagcgcctcaggccgctaccgatttcgtcaacttcatggccgaaaaagacaaccaggaagggtatgccacggcgttcagcaccattcctgcttctgctgaggcgtacgatgtggtcaccgatgagaacctcaaggacatcatcgaagccatgggcaaatccggcgatatgcagctgtggatggataccgcacttggtggaaatatcggcaacgctctgaattccggtgtagtgaacctgctttccgggcagggtacttcagctgacatcgtcaaggcgatgaaggacgccgcagccaagggctgatcgtgagcatggctgattgatatcaaaggagggtggatgccatccatccgccctccttcccatccgcaataacgtatttggtagtggagatgaccatgtcgagtgcaaatgagggcgcggtgacactgcgcgccaagcggtcccagaaaccgtccgatggcaaaatgcgtcgtaatatcgagatttttgtgctttcagcacctgctatcctcttattcctgtgtttcgtaattctgccgatcatcttgggcgcgtattacggcttctaccagtggaagggatacggcttgccttcccaaacgggcaagtttgttgggttccagaactacatcacggcgcttaaggatcccgcgttccaggcggcaattctgcataccttcgaggtcgtgatcggctcgttggtcatccaggctccgctcgccatcctgttcgcattgctgctgaaccagaagttcaaggggcgtggtctcatccgcaccctcatcttcgtgccgtatgtcgtttccgaggtcatcgtcggcacaggatggagcctgttgctacagaagaagggcgccatcaatgagattctggccaacttcggcatcaatggtcccgattggctggccgacccgaaaatcgctatttggacgctgctgttgctgatcagctggaaatacgtcggtttcgccgtaattctgatgctcgccggcatgcaatccattcccgatgaactgtatgaagcagccaaggtggatggggcgagtttctggcagatgcagaaaagcatcacgttgccgttgcttgctccgacgttgcggatctgggtgttcctttccatgattggctctctgcagcttttcgatctggtctatatcgtgtggggcaagtatgtgtcgaccaccgctggtgtgtccaccatggccacctacatggtgcgtgaaggtcgtggagccggcaactatggctatggttccgccgttgctctgatcatcttcgtgatctctttgatcatcgcactcgtctatcagaagttcgtgctgaaccgtgacttggacggtgctgttactgaacagaaagaagccaagaagcgtgccaggaagcgcgcaaaggaagcgcagcatcgtgaggttgctgccctggcaagtgaggtgaagtgatgactgccgcaacaatcgcaggacattccaacaaaagcgagtacagcaagaagaatggttaccgcatgtcctccaagacgccatggggcaacccaatcgtctacttcttctccctggtgcttgtggccatctgcgttaccccggtgctgtacatcatcttcggtggtttccgtaccaattcgcagatcaccaaccatccgtccgggctgccgaacccatgggttcccgataactacaaagcggttatcgaaagcgacattttctggactgagttgaagaattccaccattgtgggcatcgccaccatggtaggcgtcgtggtgctcggcatcatggtgagcttcgtcatcgcccgctacaaattccgttatgcgccgctcatgtatgcgttgttctccgccggcctcatgttcccgatgaccgttggcatcacaccgttgtacctgctgattcgcaacatgggcctgtccaattcgctgctgggactcatcctgccacagatcgcgttcggtcttccccagaccatcatcattctggtgccgttcctacagtcgattccgaacgaactggaagaggcgtgccttcttgatggatgctcccgccttggcttcttctggcgcatggtcattccgctgtccatgcctggcgtggccaccactggaatccttaccttcgtgggaagctggaatgcctacatgctgccgctgttcgtgctcagtgatgacagcaagtacacattgccacttggcgtacagatgttcagctccgaacactccgttgacaccgcacaggtgttggccttcacctctctggctatgattccggccctgatctgtttcaccatcttccagaagaagatcgtcggcggcctgacaggtgcggtcaagggctgacggaatgtgacaacccacgcccggaagatgttcctttccgtcttccgggcttcatctcttatgcaagaggtacattatgaagatttccaacccggtgctcaccggtttccatgccgacccctcgatgatccgcgtcggtgacacctattacattgccaattccacgttcgaatggttcccaggcgttcgcctgcatgagtccaaggacctggtgcattggaacattcttccaagcccgttgagccggtccagccagcttgatatgagaggaaacccctcttcgggaggcatctgggctcctgacctaagctatgcggatggcagattctggctgatctacactgatgtcaaggtggtcaatggtgcattcaaggattgcactaattatttggtcaccgccgaggacatccacgggccatggagcgagccgattcgcatcaacggggtcggttttgacgccagcctgttccatgacgacgacggccgcaaatacttggtgcagcagacatgggatttccgtgaataccaccaccagttcgacggtatcacattgacggaattcgacgtcgacaccatgaagctcaagccagaaacggcccgcaccatctgggatggcactgcggtgaagatcaccgaaggtccccacctatacaagaaggatggttggtactacctgttcgccgcggaaggtggcactatgtacgagcaccaggagtccgtggcacgctctcgcacccttgacgaacgttccttcgaagttatgccgaatggcccgttcatcggtaacttcgacactcctgacacctatttgcagaagcagggccacggagcgttggtggacaccccgtccggcgagtggtattacgcctccctatgcggtcgtccgtggcgtcatgataccgaaccggcccatggcacccgcggatggtgcacactcggacgcgagacctccatccagaaagtcgaatgggatgaggacggttggccgcgcgtggccggaggtcacggcggacagcgttacgttgatgctccgaaagatgccatcgagactttggccccaacgacgcgtgacgaacatgatgagttcgattccggcgagctcggtccgaattggaacacgctacgcgtcccgttcaccgacgccatgggcacggtgggcggtggcaaactggcattgcgtggtcagggctcgctgtgcaacctgtttgacctgtctcttgtggctcgtcgctggcaggcattcgatctcgacgccgaaaccaaggtgcgtttcgacccgaagaactacatgcagatggcaggcctgaccaactattacgacgacctatgctggtcatgggcgttcgtcacttgggatgagaaacgtcacgcaagggtcatcgaagtggctcagaacgatttcaaccagtacacgtcgttcctcaaggatgacgccatcgtggtgccggacgacgccgaagcggtatggctgcgcaccaaggtccgcacggaatactattcctacgaatattccttcgacggggaacatttcaccgagattccggtcaggctcgatgcgaagatcctgtccgacgattacgtgaaccaacgttacggcggcttctttaccggcgcgttcgtgggacttgcctgtgttgatctgtctggctatgacgcgaaagccgaattcgactatttcgattatcgggagctttccgacaaccggtagtcgatgccgacgggcggcgattcgccgcattcctgccgcccgtcgattatttggtgaaatgaacgcagactcaatggggagaacgctgagatgactttgcgattgccgaaactacttgacgacggctgcgtgctgcaagccggtgtggacatgcatatttggggcaccggcgatcccggacgcggcgtgctggtacgcctcgatggtagggaccggactacgcgggtgggagacgacggctcatggagcgcgccgtacggtccaatcaaagcaggcggaccgtacgatttgacggtgcgttatgaggacggaaccgaatgcatctcgcgccaatgctatgcgggagaagtgttcctgtgttcgggacagtcgaacatggaactgcccatggcttgggtgcgtgcggactatccgctggagtgggatcgtgagcctgacccattgctgcggcaatacaaagcgattcccgattgtgacttcaacggtccccgcagcgatcatgaccatgcgttctggcaggggtgcgatgcggaaacccttggagatttctccgcgctcgcctatttcttcggacgcaggatccgccagtggctcggtgtgcccgttggtctgttgaacatttcattgggcggctctccgatcgaatcctggatggatattgacacattacgagcgttccctgaagcgctcgccagtcttgaaccgtaccttggcgatggtgtggcgtcgaaaagaagcctcgattccgttgctgaacgagaccggtggtaccaagcgctcgggtacgaggccgtggccgatgcgcaccatgagtggctgccattgattccgtggcactgtccggaatccaagaatgtcgaaccacgggatgcagcttggcatgacatccgtttgcctgggtggtacggggatcgtggactcgctggtttccgtggcgagatcattgtaaagaaaaccgtgttcctgcctccgtcggatgcgggcaagcccgctctactgcgtctgggcaccatgaatgatgccgaccatacgtgggtcaatggtgtgttggtcggtgggcgaagcaatgtgtatgaaccacgggactatccggtcgcagcgggcgtgctgcgcgccggcgcgaacgaaatccgcgtgcgtctggtcgttgaacgacctggcggacgtgtgacgcccggcaaacggatgacattgaccgtcggagacgatgtcttcgatctatccggcatctggcagtatgctgtgaccgccgaagccgatcgcgattgtccattcgaggatttcgtcagatggaagccgaccggcctgtacaacgccatgctcgccccgtgttttccatatgcggtgcgagccgtgctgtggtatcagggcgaatcgaataccggcgactacgccatgcgttatggcgatgagctgaaagccatgattgaattgtggcgtggcaagtggcatcagccggatatgccgtttctgatcgtccagcttccaaaattcgacattgacgccattgaggatggaggctggccactcgtccgcgaacaggaatggaacgtcgcgaacgaacttgaaaacgttgcgacggtggtgacgcttgacgccggcgagggcaacgatctgcatccgtatgacaagaagctcgtcgcggatcgcgtgttcaatgccgcgatggatttggtatacggtcgccaggctcagcctcaaccggccgtggaaaccatcgaggtctgcggagatctgttgcggatgcactgtgtgtggcggagtcgctcggacgagcggatccgatcggagggccgccggctgatgacgttggacggtgacgctccccaggaaatcgaatttctatggcgcgactgcgccacatccgcgcgggccgaggcatggctagacggctgtgatatcgtggcgcgcatgacggcgcgcaggccagatgaggtgcggtacgcgtggagcaacaatccggaatccggactcatatgcgacggcgacggcatgctgattccgccgttccgcctgacattgcccacggacgatgataaggggattcatgcgtagacaggtcgcgcttcgacaaggactcgtcgatggattctccgatacggactctgtaattaccgtgtttcgtggcatcccctatgccaagccttcccgttggcgcattacgatttgtctcgtgtcatgattcggtattggacgaatttcgcggcgacgggcgatccgaacggttccggattgcccgaatgtccggcatgcggacccaatggccaacgatacatgctgctcggcggatgccatgatacatcggatagtatgtcgtatgccaggtcaagtagatgaatatagtatagtgtgagcgttcactatagcgtggtggaaatcgtgacgaaggagacgggcatgacgaaggagacggagacgctgatcgcgtccgacgaggatctgactaggctgttcgccggcaagccgacgcaataccgcaaatcgaagtcgctgccgaagtttactggcgaggccatgcgtacctgcgccacgatcaaccgcatcttcttcgatgatcctgacgaggcctaccgcctgttccacgagctcgttcccgacgcaggggagggcgtacaattcacgccgccgttcaatgtggattatggcatcggcctgaccattggccgaggcacgttcttgaacaaggatttcatggtgtgcggcggcggatatgtaacgcttggcgaggattgcctgatcggcccgcgttgtaccattgccacgccgaatcatgccttggatgcggcaacgcgactggctggctgggaacatgcttcgccggtgacgattggtgacaacgtgtggtttggtgcgaacgttacggtcacgcctggcgtcacgattggctcgaattccattatcggcgcgggttctgtggttacacgagacattcccgccaattcgatcgcagtcggcaatccggcgcatgtaatccgcgagattcccgaacgcgatcctgccttcgccgatgtcgagggcatcatctgacgttgggttacggtgttccctcagagcgaattcgcgtgttgccctactgctagacgtgttgtcgcacgatttcagttttgacctcacgatttgatcggaatatcgcacgattttgtttgagacgaaaatgggtgccgtcacggtttggctgtgatggcacccatttttatgttggatcactcgcgattcacgatggccgattgatcagccgcgtgcttttacataggcctcgtacacggcttcagtcggttcgccggtttccacgccgtcgatggtgagctgccatgcgggcggttccgtttcgccggacagcacccaggcggcctggcgggcggcgccgatggcaacatactcgtcggtggtcgggcgggtcacgtccatgccgaacacgctcggcgcgagcgtgcggattgcctcggactttgcgccgccgccgataagcagaatgcgggaaatctcagcgccaagcgaacgaataagctccaggcagtcgcgctgggagcacagcaagccctcgacgaacgcgcgggccatgttctcgcgtgtggtgttggccagcgtcatgccggaaagggttgcggtggcgtccggacggttcggagtgcgctcgccgtcgaaatacggcaccagcgtaataccgccggcgcccggttcggaagcgaatgccagggatgcgagttcgtcgtagtcgacgccgagggctgcacggccggcgtcgagaatgcgcgatccgttgatggtgcaggccagtggcaggtagtggccggtgcagtcggcgaagccggaaacggcaccggtcaaatcgtaggtcggattttcggaaatggctgctgccacgccggaagtgcccaacgaaacggaaacgtcacccacgctcatgccaagtccgagggatgccatggcgttgtcgccgccacccggtgcgatgatgcaaccaccttcaacgttcttgccggcaattttcggacttgccttgactgcggcgacgtcacgcggtccaagcacggtcggcagcatgatcgcgtcggcatgcttgcgcgccgcttcggcaccttccgctggttcaagcaccatggcgatcagatcgcggcggtattcgttggaagcggcatcgtaatagatggtgccggaagcgtcggaacggtcggtgaacagcgcttccaagtgtgcgtcctcgccttctgcgactggaccgtagcctgcgatacgccagctcagccaatcgtgcggcaggcagatcgcggcgatcttcttggcgttttccggctcgttttcagccacccacgccactttggtcagcgtgaaggaagcaacgggggaggatccgacggccttgacccagcgttgcttgccacgcgcgatcacatcttccggttcgccctcttcggcgggagcctcgcccatcttctcgatgagggccgcggcctgcggcgccgagcttacgtcgttccacagcatggcgtcgcgaatcacactgccctgctgatcgagaatcaccatgccgtgctgctgaccgccgacggcaagtgcctcaacgtcgtcaagtccaccagcctgttgggatgcctcaaggaacgcgtcccaccagtatttcgggtcgatagacgtgccattggggtgcttggcctggccgaaacgcaccatttcgccggtttcggcgtcggtcacgcgcactttgcaagactgggtcgaggtgtcgacgccggccacgagagttcgagtcattgtgcctccttgcagtgagctggcgcaacacgatgcaaggaaaatgcaccgttcgccacctcatttagttagatgaatgaactataatgtctagtgtaccatcataaagtgatttaactattgaggcggtgcgctttttcggcaaagacgcgtcaaagaggagggaaccatggcttcactgcggagcatcaatcaagacgatttgcgaaaccataatctttccgtggtgctcgactcgctgttgcgtgccaccgaaccaatgagtcgcgccgatcttgccaagaaaaccggattgaccaaagcggccatgtcggtattggtgtcgttgatgctcgacaatgagattctggtggaaggcgcgccttccggccaatcgctgtatgggcgccccagcattccgcttgaaatcaaaggtggacgcctgtgcggcatgggattgcaggccaacaccgacggctatggtgtggtggtgctcgatcttgacggttccgttgtgggggagcagtgggtcgacgccgacatggccaacgccgacgagcgggcgattttcgcccgtctcgacgaactggctttgcagcaggaagaagcgcttgccaagaaaggttatgtgcttgccggtaccggtttggcattgccgggtctcgtcaccgatgatctgcgattgcttggcgcgcgcaatctcggttgggaacgtttggatctcaagcagttcgatgtggtcaggcgacttgatcctgttgcctgcaacgaggccaatgccgccgcgttggcacaggttcccggctatgccacgcagcgtaaggattctgggcggatcaagccgacggattcgtttatttacatgtcgaccgacgtgggtatcggcggtgcagtgatccgcgaagggcgtgtggtgagcggtgatcacggtttcggtggcgaattgggccatgtttccgtcgacatgcgtggtcccatctgccgttgtggccgtcgcggctgccttgaagtgtatgcgggcaggcgttccatggtgagcgcggccggaatcgccagcagcgatgccgccgcgacccgcagcgccatcgacgaattgatcgaccgctggcaccagcgcgatgcgcagaccgtggccgttgtggaaaaagcattggaggccatggcttccgtaatcgcatcgaccatcaatgtctgtgacgtcgacgtggtgatgctcggcggcttgtgggcgcgtttcgaacctgaactgattcgcagaatcgaacgcatggtacgcccgcaagtgctggcgtatccggaagtcgaggcaagcgtgcttgtggcggatatcgtcgatcgtccggccttgatgggcgctgcggaaatcggtttgcgacgctttatcgacaatccgctgcgtttcatgaagcaaaactagtccacccatttgctaaacttgctaagttggcatgttcgcatgttgcaacgtggggcgttagctcagtcggttagagcatcggactcataatccgccggtccacggttcaagcccgtgacgccccactctttcacaaagtcaaggcttctgatatactctgcaaggttatccggttcacgctctgccataggggctcagcgacccgggtcccccgaatctctaggagacaaactatgaagcagggtatccatcctgattaccacgcagtgcaggtcacctgctcttgcggcaacaccttcgtcacccgttccacctacagcggcgatcacatgaccgtcgacgtgtgctccagctgccacccgttctacaccggcaagcagaagatcctcgacaccggtggtcgcgtggcacgcttcgagaagcgttacggcaagaaggccaagtgagtcttattgcttaggcaatgaaaaacgccagtccgattgtgggctggcgtttttcattatgcgacggatgcgcatgcgctggcgtgcatgcgatcgggatattcgtaagatgcgtgggatgcctgcgaaataccgcgcttcggcagcgtttccaaggcaccttatatgatggacaggttgagtggagttcagcgaagcgttcacgctgaagcgcagatttataggcagatagaaaaggcgtacattggcagacgagcagttccccgcggcagttaccgcacttgaggaatatcataatatcgaacagcagatggccgagccggaagtcgcgtcggatccggataagatgcgtaagctgggacgtcgtcacgccgagttgggcgtcatcgtttccgcatacaccgcatacaagcaggtgaaagacgatctggaggcagccaaggaaatggcttccgaagatccggatttcgcggaagaagcgaaacgtttggagagcgagcttccggcagttgaggagaaactgcgcaccgcgttgattccgcgcgatcccgatgatgcgcgcgatacgatcatggaaatcaaggcgggcaccggcggcgaggaagccgcgttgttcgccggcgatctgctacgcatgtacatgcgatatgcggaaaagcgtggttggaccgtcaccctgcaaagcgaaaacaccaccgaactgggcggcgtcaaagacgtgcagctcgccatccgagccaagggcactcccgctccggaagacggcgtatgggcatccctcaaatacgagggtggcgtgcatcgcgtgcagcgtatccccgtcaccgaatcgcagggccgtattcagacgtccgcagcgggcgtcattgtattcccggaagccgatgaagatgacgatgagatcgaaatcgatcagaaagatctgaaaatcgacatcttcatgagctctggcccgggcggccagtccgtgaacaccacatattccgcagttcgtatgacccacattccgactggcatcgtggtgagcatgcaggatgagaagagccagatccagaatcgtgcggccgcactgcgcgtgttgaagagccgcctgctcgccatgaagcacgaggaggaagccgcacaggccgcagacatgcgtcactcccaggtgcgttcgctggatcgttccgaacgaatccgcacctacaatttcccggagaaccgtatcgtcgatcatcgcacgaactacaaggcgtacaaccttgacgccgtgcttgacggcgacctgcaggctgtgatcgacagcgacattcaggctgacgaagccgatcgcttggccaatcagaagtaaaggcggccgatggctaccgtattcgaactcgtgcgatccgcttcggccatgttgcgtgcgtccggtgttgacactccggagcacgatgccaaattattggccgccgaagtattcggcgtcgacctgcagaccgtcgacaaggccatgctgatgggaagcgaaacatccgaactggcgaagcaaggcgcgaagcagagcggtgaggacgctgcgttgaagcgattccacaccatggtggatcgcaggtccaagcgtgaaccgctgcaacatatcactggccacgcgcccttccgctacctcgatctgaaggttggtccgggcgtgttcattccgcgtcaggaaaccgaactcgtggtgcaggaaggtgtcgactggatcaccaagcacggcatgtattcggcgaaagtggtcgatctgtgcgcgggaagcggcgcaatcggcctgtcattcgtgacggaagtgcccggcagcgaggtgtgggcggtcgaaaaaagcgagcaaaccgcgcaatggacccgcgtcaatctcaacgaaaccgcaaaaaagtaccccagcatcgccagcaactatcatctggaaatcgctgatgccacgcaaacaccgacgctgaaccagctggacggcacgatcgatatcgtgctcaccaatcctccgtatgtgcctcttgcggatattccgcagcaaccggaagtacgcgactacgatcccgatcttgcgctatacggcggttccgcagatggcacgcttattccggaacgcattatcgcccgtgccgcaaaactgctgaaaaacggcggtttgctggtaatggaacacgatattacgcaaggtgaacgattgtctgcattcgcgctgtcatatggattcagcaatgtgatggtgcataacgattacacaggtcgcccgcgatacatgaccgcgaaaaagcagtgatgcaacgcgtctcagaataagagatttttccaggggaacgtggtttttctgttgcaatagagttccagttggaagtccgaccattgcattagaccagttcagcggtaagcataccggttgcggaagcatccacaagatgaggcgtccggttgcgctgacaggaagagaaggaacggcagtgaaaatcaagaatgccgaaaaactggccgcactctgtcttgcggcggttatgggagtgagtgttacagcctgttcgggcggcaacatgtacgccaccagtaatgagagcgccaccatcgcggataacgatgtgatcaccatcggctcggtcaccaccaattccggtgcagccgcagcctatggcgaagccgaagtgaacgggttcaaactggcggtcaaggaaatcaacgccgatgggggaatcttcggcaaacagatcaaactggaatccatggacgacaagggtgatgtgatcgaggcgtccaacgcctttaaccgtctggccggcgacaagaacgtgatcgccgtgctcggaccgaccatttcgtcaacctccggtgccgtcgcgccgctcgccgaccagaaccagatgccgaccatcgctccggccgcaaccgccgattccgtggaaacgggcggatacctgttccgcacctgcttcaaggactcctaccagggcgagatcgccgccaagtatgcggccgaaacattgaaggtcaagaaagtggccgtgctgtatggcacgggcgatccgtattcgtctggtgtgggcaaggcttttgttgcggcggcgaagaagaacggactcgacgtggtggcggaagagaattcctctagcgccgacgataccgaatactcgtcgcagctgcagaaaatcgaagcttctggtgcggaattcctatatgcgccgtactactattccacggttggcccgtacattgtgccacaggcgcgagcggtcggctatgagggctacatcatgggccccgacggctacgacggcctcaaaaccacgggaaacaaagcgaactacaacaaggtgctgtacaccacgcattattcgccggatgacaagtccaacacgaaggtgcagcagttcatcacctcatacaagaaggccaataacggcgaatcgccgaacaccttcaccgcgctcggttacgattccgtctacatgttcaagcgggccatcgaacaagccggtgaaaacgccactcgtgccgatattcgcaacgccatcgcaggtatgagcttctccggcgtgaccggcgcattcacgctcgacaagcatggttctccgaagaaatcggtgattgtgctggaaatgagcgacggcgaaccgacatacaaagacaccatccagccggcgaaatagcgaaaaaacgcgaggaatcaagaaaaacaagacttcaactgacgaaacaacaagaaaggagggatgatgagcgattcggtcattatgttcatcggtcagatcttcaacggtctgaaaatcggcagcgtgtattcgcttgtggccctcggctacaccatggtgtacggcatcatccgactgatcaatttcgcgcacggcgacttcatcatggtcggctcctacgcgctgatgcttaccattccgttcattatcgcctgcggtctgcccgcatggttcgccgtgattccggcggtgcttgtgtgcgtggcggtgggtattatcgtggaaagggccgcgtacaagccggtgcgtgaaaaaggcaataatatgacggcgctgatcactgcgatcgccatgagcctgctgcttgaaaacggctcccaggcgctgttcggcgctgattatcagaccgtgccaaccatcgttgaaattccaacgctggtgcttggcaaactcaaagtcgacggagcgaccatcataacggtgctgctcggcatcgccatcatggtcgcgttgcagctgttcgtctccctcaccaagcagggcaaggccatgcgtgcggtgtccgaagacaaggaagcgtcgattctgatgggcatcaacgtggactccaccatcacgttgaccttcgccatcggctccggcctggctgcggtggcggcgcttatgtactgcatttcctacccgcaggtctctccgatgatgggtgccatgctgggcttgaaagcgttcgtcgccgcggtgcttggcggcatcggttccattccgggcgctatggtcggtggcttgctgatcggcgtggccgagagtcttaccaaggcgtatatcggtacgattacggccggtgtgatcacgtcggcgttctctgacgccattgtgttcggcattctcatcatcgtgctgctggtcaagccgtccggtctgatgggcgagccggaaagcgagaaggtgtgattatgaagaaatcaatgctttccatgaagcaatcgtatgcattgtgtgccattggcgtgcttgtgctgttcggcattcttgttgcggtatgtgaaacgggcgctatttccctgtatgtcaagggtgttctcatgacttgctgcattgcggtgatcatgaccacgtcgttgaatctgacgatcggtgtgctcggacagcttacgctcggctgctgcggtttcgaggcgatcggcgcatattccgccgcgttgatgagcaagctgctggttgccaacggcgttcagatggatgatacggtgcgtttcctgctggtcacgttcgtcggcggtgtggtggcatgtgtgttcggtgtgctcgtcggcattccggcattgcgtttgcacggcgattatcttgcgattatcacgcttggtttcggtgagatcattcgtgtgatcatccagaatctgaaagtggccggcggcaagggacttgcggacggtcagcaggggcaggcactgatcggcatcgaccgtcttgccaatctgtatgtggtgttctgtatcaccgtcgtgaccgtggtgctgttgttcatgttcgcgcgttcccgttatggtcgtgcggtcaaggcgattcgtgatgatgagatcgcggctggcgcttccggcatcaacatcacctatatgaaagtgctcgtttttgcgatttccgcgttcttcgcgggtattgcgggtggtattttcgcgcaatatatcggtgcgctcacgccaagcatggccggttggctgcagtcgatcaattacgtgatcatggtggtgttcggcggtatgggttcgctgacgggttccattgtcgccgcggttggtctgacgattttgccggaattgctgcgtgcgttctccgcataccgcatgctcgtgtattcggtggtgctggtgatcattatggtgttccgtccgcagggattgttcggcaattgggagttctcgctgccgaaattcgtcaacaagtggttctatccggtacgcgtgaagatgcacggcaaatcgggtgcgtctcaattggcatctaagaaaaccaaggaaaccggcgagactgccgcatctagcgaagtcaacacatccagcgaagacaaggaggtgcaggcatgagcgagccgattctgaaggccgagcatctcggcatcaccttcggaggcctcaaagccgtatccgacttcaacatgaccatcaatgcgggcgagcttgtcggtctgatcgggccgaacggcgcaggcaagaccactgtgttcaacctgctgaccggcgtctaccagcccacggaaggtgagttcttcctcgacggcaaacgcatgaacggcaagaaaacgtatcaggtcgtgcgtgcgggaatcgcaagaaccttccaaaacattcgactgttcgatcaaatgacggtcgaagagaacgtgcttgtggcgttcaacgaatccttcacctaccggctgggcggtgcgatcttccgcacgccgaccttctggaagcaggaacgcgacatgcatgccaaatccatagacctgctgcgtattttcggactggaaggattggccgaaaccgaagccgcgaatctgccgtatggagcgcaacgtaagctggaaatcgcacgagcgttggcgaccggcatgaaactgctgttgcttgacgagcctgcggcaggcatgaatcctacggaaaccgaggatctgctgaactgcatcaacacgatccgcgaccgtttcggcatcgccattctgctgatcgaacatgatatgagcctggtgatgaacgtgtgccagcgtattcaagtgcttgattacggacgtaccatcgcctctggaacgccagaggaaatcgccaacaatccgcaggtcatctccgcatatcttggtgcggacgatgctgaaaacaatgccgtcgaaacgtctgaaacgaccgaaaggaaggacgcctgatgctgcagatcaagaatctttccgtctcctacggtgccatcgaagcggtcaaaaacatcagtctgacggtgaacgacggcgagatcgtgtcgctgatcggtgcgaacggtgctggcaaaaccacgacattgcataccatcacaggtcttactccggcggtttccggcgaggtgctgttcaacggcgtggacctgctgaaaacaccgaacaataagatcgtgaccctcggcatggcgcatattcccgaaggacgccacgtgttcacacgcatgagcgtgcaggaaaaccttgaaatgggcgcgttcagtctcaaagaccggtctcacatggcggacgatcttgccatggtgttcgacatgttcccacgcctgaaggaacgccgcaaccagaaggcgggcacgctttccggcggcgaacagcagatgctggcgatgggccgcgccctgatgagccacccgaacacgattctgatggacgagccgtcgatgggtctgtctccgaaactcgtcaaagagatcttcgccattattcgcaagctgcacgatcagggcattaccgtgctgctggtcgaacagaacgcgaatatggccctgtcgatcgccgatcgtgcgtatgtgctcgaaaccgggcgcatcaccatggaaggcgacgccaaggagctgatggacaacgagcaggtgcgcaaggcgtatctgggagcgtaaggcggccgcaaggcttataaggaacgcacgaaccggaatatcagtcgggtctaaggattcctgcattacaatggtgaggtcagcaagccgaaaagggaggtgtcatgagcgagattcgcgccatttccgacgaatcccttgcccaagctgtcgaaatcgtacgcgacggcggattgatcgtgattcctacggacacggtctacggcgtcgcgtgcgatccgcgcaacatcgaagcgattcgcaatgttttcgcggcgaaaaaacgcccgaaatataagtcgttgcaggtgctgttgccatccatcgaaagtttagagaaactgcatttggatctgccggtgccgctgaaccgcttggctgccatgttcatgccgggcgcgttctctccgatcgccgtggccgataacgattgcacgctcgccacggtacgtaccgatcccgccaccggcaaggtcacgcagggcgtgcgcattccgaattccgcggccgccttgcgtgtgctgcgcgctaccggaccgttggccgccaccagtgccaaccgttccggcgatgaaagcgcgcaaaccgttgacgaggccgtgcaggcgcttggcgatgcggttgatttgtatttggatgggggagcgactcccggtcatgtggcttccacggttgtggcggctgaccctcatgggcgtgatggcattgcgattcttcgagagggagtgattcacgagccggttatccgaaaggccttgacgttgaatggcggtgctttgggcgtatgagaatctatctgttcattgctgcgattgctggcggcgtcacctatttgatcacgccgttgattcgccatatcgccattgagatcggcgccgtcggcgaagtgcgtgcgcgagacgtgcataccattccgacgccgcgactgggtggtttgggcatgctgatcggtttcaccgtgtcgatgctgttcgcatcccgcattccgttcattcaaggattgttcgcgcaatcgcaacaggcgtgggtgattctcgccggcgccattatgatcagtctgcttggcatggccgacgacttgtgggatcttgattggatgctcaagcttgccggtcagctgttgatttccgtgttcgtggcatggggcggtctgcagatcatttcgcttccgcttggttcgttggtgacggcgtcgccgagcctgtcgatggccatcaccgcgtttttgatcgtcgcgtccatcaatgcggtcaatttcgtggatgggttggacggtctgtcgtcgggcattgtggcgatcggcggcatcgcattcgccatttattcatacatcatcgcccgcaactcgccttcgtacgcttcgatggcgacattgatcgacattgccatggtcggcatgtgcgtgggctttttgatgcacaactggcatccggcgaagctgttcatgggagactccggttccatgctgctcggctatttgatcacgtgcgcgtcgattgtgatgacgggccgccttgacccggccagtattcatgccagcatttacttgccggtgttcatgccgattctgctgccgattctggtattgttcctgccgattctcgacatgtgtcttgcgattgtgcgccgcttgcgcaagggacagtctccgatgcatccggaccgcatgcacttgcatcatcgcatgctgcgcatcggccattccgtgcagggggctgtgctgattctgtggggttgggcggcactgatcgcattcggctcgattatgacgctgtttttcaaggcccaatacgtgcttgttggattcctgattgcggccgtggtgctgaccgtcgccaccatgtatccgtatgtgaagcataggattcccgagatgctggaggaggatgctgtggatggcggcagacatgcgtcggtgcggtcgtcgaagcgtcggaaaaactgattaaacgctttgcctcgcggtattagttaactttcgtaacacccttgtttgccgcttgttctgccgtgtcgcggtaagtcagcccgcgttcatatagtgggtctatggctacaattcctgatatgaatgcagattccacgtacgctccacttcctccgattttcgcacagcttggcctcgcctatgacgatgtgctgctgttgccgaacgagacggatgtcattccgtccgaagtggacaccaccacccatctgacccgcaacatcacgatgaaggtcccggcgatctccgccgcaatggacaccgtcaccgagtccgacatggccatcgccatggctcgtaatggcggcatcggcgtgctgcaccgcaatctttccatcgacgaccaggccgctcaggtcgacatcgtcaagcgctccgaatccggtatgatcaacgatccattgaccgtcagcccggatgtgacgctggctgatctcgacaagctgtgcggccgtttccatatctccggtctgccggtcgttgacaacgacaacaagctcgtcggcatcatcaccaaccgtgacatgcgtttcatcgcctccgaggattacgaccgtctcaaggtttccgaggtcatgacccgcgaaaacctcatcaccggcccgtccaacatctccaaggaagatgcccacgacctgctggccaagcacaaggtcgagaagctgccgctggttgacgatgaaggccacctcaccggcttgatcaccgtgaaggactttgtgaagaccgagcagtatccggacgccaccaaggacgaacagggtcgtctgcgcgttgccgccggcatcggcttcctgggtgacgcctacaaccgtgcttccgctctgatggaagccggcgtggacgtgctcgtggtcgacaccgccaacggtgaggccaagctggctctcgacatgattcgtcgcttgaagtccgattccgcgttcaagggcgttgacatcatcggcggtaacgtggccacccgtcagggcgctcaggccatgatcgacgccggtgttgacgcagtcaaggttggcgtgggcccaggctccatctgcaccacccgcgtggtggccggtgtcggtgtgccgcagctcaccgcagtgtacgaggccgctcaggcctgccgtgccgctggcgtgccgtgcatcgccgacggtggcattcactactccggcgacatcgccaaggctctggttgccggtgcctccaccgtcatgctcggcggcaccctcgcaggctgcgaggaagctccgggtgagaaggtgctgctgcacggcaagcagtacaagctgtaccgtggcatgggctccctcggcgccatggctccgcgtggcaagaagtcctactccaaggatcgctacttccaggccgacgtcacctccaacgacaaggtcgttccggaaggcgttgaaggcgaagtgccgtaccgcggaccgctgaacgcagtgctgtaccagatgatcggtggcctgcaccagtccatgttctacatcggcgctcacaacatcgccgaaatgccggaacgtggccgtttcatccgtatcaccgacgctggcttgcgcgaatcccatccgcatgacatcgtcatgactgccgaagctccgaactactccggccgccagtgattgctgaattccagtaatcaaaatcggtaaaagcctcttacttctcggaaaagaccgaaagtaagaggctttactcatatctgcaacgtgaatatttataaccgaacgtcgccctatcgccaagtagcggtgtttgatgtacgaagcaaatcgctaaaacaagtgtgacttcccggtgcgtaggccttccaatctccctacctcgcggtatcttcgaatgttcagctgaagcgtgccaagcggcacgcgcacacgcaaaggaaacgaggcaaaatggttgacgcacatgacggcgaaacgtatacggcgaaaggttcgcgactgatttggatcgattgcgaaatgaccggcttggatattttccacgatgaactgtgcgagatctccgtggtaccgacggacttcgacctcaacgtgctcgacgaaggcatcgatttcgtgatcaagccttccgatgcggccgtggccaatatgaacgatttcgtgcgcgccatgcacactcgttccggactcatcaatgaatgggagaacggcctgagcgtcgaagaagccgagcggaaagtcaccgaatacgtggcccgcttcaccccggacggcgtcaagccgctgctcgcaggcaactccatcggatcagacaaaaaattcctcgaccgttacatgccgaacctcatggaacacctgcactaccgtgtaatcgacgtgagcacgctcaaagagcttgcccgccgctggtatccggccgtatacaacaaccgtccgccgaagaacggcgggcatcgcgcgctcgccgacatcatcgaatccttggatgaactgcgttactaccgtaaggcgttcatggcagcggcgcccggtcctgacgcagccgaagccaaggcgatcgccgatcagatcgtggcaaccagcattttgaacaacaactgattccgcatatcgcacaatcgttggaaaacctgatattccaacgaaaacatggaagggactccagtgagcgcagccgattggaccagcatcgaaatcccgcaagacattcgcttggtggttgccgatatggacggcaccctgcttgatgagcatagcgagattccgcaaggtttctggccgatgcttgcccggctgcgctcgcgaggtgttgaattcgtgccggcgtccggacgccagtacgctaccttgcgtgccatgttcgccgataaggcggcgcgggtgcttgacggcggcgaactttcgtatatcgcggaaaacggcaatgtcgtggccattgacggtaatatcgccgaagtgcacggcgtcgataccgatgtgacccgctggaccatcgacacagtgaacgcttctgccgcggctggcgaatacgatatgggattggtgctttgtggcctgcgcacggcatatgtgcagcgcacggacaagccgttccttgacgaagtcggcaaatattatgcggcactggagattgtggacgatctgcatagcgtgcttgaagatatgatcgcttcaaacggcgaaagcgacaccatgctcaaactggcgattctcgatttcgacggtgccgaagcgatggccgcggaaaagctgacgccactgaaaaacgattatcaggtggtggtttccggcaaactgtgggtcgacatcatgaatgctacaaccaataagaagcagggcgtcgaagcgttgcagcgcgtgcttggcgtcactgcggcccaaacggcggtattcggcgattatctcaacgatctgcagatgctttcggcggggcagtggtcgtttgccatgggcaatgcgcaccccgcgttgaagcaagcagcgcattttgtggctccatccaatgccgatcacggggtgcttcaggttgtcgacaagctgattgcgtaaggaagccgttttttcgaaattgatggtcgattgaacaggaaaggcggtgtggcatgcggcagactgaggcattggcgattctgcaaagtggcgcgagcgtctttctgacgggtgcgccgggtgctggcaagacttacgtgctcaatgagttcgtgcgtcaggcccgtgccgaaggtgcggcggtgtcggtgacggcgtctaccggtatcgcggccacgcatatcaacgggcagaccattcattcatggagcggtgtcggacttgccaacgcgctcaccgacaatctgatcaaaaccatacgtacccgacgcaaacgtaagctgcagggcgctgacattctcatcatcgatgaggtttccatgctgcatgcgtggctgttcgacatggtcgatcaggtgtgccgcatcattcgacgtgaccaacgcccgttcggagggcttcaagtggtgctgtccggcgatttcttccagcttcctccagtgagtgtgggtgggcgcaaccacgatttggtcacgccaagcccggaattcgtggcttcccgcgaacagtatgcgaaagcgggactcaatccagatggtttcgtcaccgaatcattggtatggcgggaattgaatcccgcaatctgttacctgaccgaacagcatcgtcaggatgacggcagtctgctcaccgtattgaccgatattcgcaacggttgcgtgaatgacgacgatcgcaatgtgctcctcaccagactgggcgcaatccccgaacctggtcagcaggccgtcaatctgtttcccgtcaacaagcaggcggacaggctcaacgacatgcgtctgttcgaaatcaacgaggaaccgcacgaatatttcgccgaagccgcaggaccagtcaatctggtggaacgtttgaagaaaaacatgcttgcccccgaacgcttgcagctcaaaaccggagccgcggtgatggccgtacgcaatgacaccgaccaccaattcgtgaacggatcattgggcaccgtgcgcggatttgccgccgaaaacaagggcggatggccgatcgttgaattcgaaaacggcaatatcgtcaccatgaagccgaattgctgggaaatgatggacggcgacacagtgcttgccagcgtcaaccaagtgccgttgcgctgcgcgtgggcgatcaccatccacaaatcgcaaggtatgacgctcgaccgtgcggcgatggatttgcggcgcaccttcgcgcccggcatggggtatgtggcgctgtctcgcgtggaaggtctgcaaggcctgtatttgaacggtgtgaacgaacgcatgtttttggtttcgcccgatgcggtgcgcctggacggcgagttgcgtctcgcctcggcgcaggcatccgatatgttggctcacgatggcatcgccgcgttccggcagaacattgccgttcccgacggtgacgagttcgcgcaggacgcgctgttctagtatggcgattgccttgtttgacatgtatgatgatttttgggattcgacggatatgactgttgtgttccgtccgtgcgttgccatacgtcggtgaacgggtggttggattgggcttacgtccccttgcctgagtagttttgggcatatgactaaagcacttcgtatgtccaccatgttcctgcgcactctgcgtgaggatcccgccgatgccgatgtcgtatcggataagcttctgcagcgcgcctgctacctgcgcaaggccgctccgggtatttggacctggctgccgctgggcctgaatgttctgaacaagatcgaaaacatcatccgtgaggaaatggcttcgatcgacgcccaggaagttcacttctccggtctgctgccgcgtgaaccgtatgaggccacccatcgttgggaagagtatggcgacaacatcttccgtttgaaggatcgccatgaggccgactacctgctggcgccgacccatgaggaaatgttcaccctgctggtcaaggacctgtactcctcctacaaggatctgccggttaccctctaccagattcagaccaagtatcgtgacgaattccgtccgcgtgcaggcctgattcgtggccgtgaattcatcatgaaggatgcctactccttcacgcttgacaaggaaggccttgtcaaggcatatatggacgagcgtggcgcctacgagcgtattttcaaccgtctcgatttgaagtatgtgccggtgcacgccatggcaggtccgatgggcggtttcgaatccgaagagttccttgccccgatggaaatcggtgaagataccttcgcacagtcgccgagcggcaaggcttggaatgttgaggcgctgaccactccggaaccggaagccatcgacttcagcaacactccggccgctgaaaagcgtccgacgccgaatgctgaaaccatcgatcagatggttgaatttgccaacgccaaccatccgcgttccgatggccgcgcgtgggaggcctccgacattctgaagaacgtggtgatcgccgtgatgcatccgcaggatgacgagcatgacgagccgtggcgcgaactggtggtcgtcggcgtgcctggcgatcgtaccgttgacatgaagcgtcttgaagcgcagttcactccggctgaaatcgaagaggccaccgacgaggatctgaagaagcatccggaactcgtcaagggctatattggcccgatggcgtttggcccgcaggctcgcggcggtgaaaaggctgaaaacgccaacgaaaccggcgaagcgttgcgttacctcattgacgcgcatatcgcccgcggttccgcatggttcaccggtgccgatgaagccggagtcgactactacgatctcgtgtacggtcgtgacttcgaagccgacggcgtggtggaagccgtgcaggttcgccacggagacatgagcccggacggttccggcccgctgagcttcgaacgcggtgtggaaatcggccaggtgttccagcttggcttgaagtattccaacgcgctcggcctgaaggtgctcgaccagaacggcaagaccgtgccggtgtggatgggctcctacggcattggcgtgtctcgtgtgatggcttgtatcgctgaaacccaccatgacgagaagggcttggcatggccggccatcatcgctcccgcccaggtgcatgtggtagccaccggcaaggatgcggctgcattcgaagccgccgagcaactgatcgccgatctggaagccaagggcatcgaagtgatcttcgatgaccgtaagaaggtttccccgggcgtcaagttcaaggatgccgagcttatcggcgtgccgctgatcgccgtcgcaggccgcgacactgtcaacaatggcaccattgaagtgcgtgaccgcaatggcgagaacgccgaagccgtgcctgtcgccgacgcagcccgggtgattgccgatcgtgtcgccgcgctgctgaagtaataatcgtaaaccatttcgattattccaaggattacacggaagattatggatgcaccatagtcttccgttttttttttaaaaaaaaagtgatcgaagaattgcagaaaatattcattgggaaatcagacgaaatcctacacacctatcgacggtgcattgctgtggataagtgaaaagatatccacctactatccacgactcgcccgaaatgacgtcctctatccacattcgtcagtcgagctggtgcaagcaaagccgattcggcgatagtgatggtaccgcggaaacgcaaggaagcggaaaggcgtgcagaacccctctctcgcaacccatttctccgactgcgcgttgctttcgcaccttcatcggtgctttccgcggcccctttattaccaatgcgacagaaagggccgatcatggcacaacagcaagctctcatcaccatcaccggatatgtgggcgccaatcccacgcaattcaacaaggatggcatgccccatgccagttcgttcagaatggcgagcaccagacggtatttcgacaatcgcacacagcaatggaaggatcttcccaccacatggatcacggtgaaagcgtaccggaacctatccgagaacatctgccaatctctgaagaaaggcgagccggttatcgtgatgggcgcgctcgccacggaaacgtgggccgatcagaacggcaaaccgcagtcacgcatagtgctggaagccagcgccgcagggcacgaccttaaccggggagtcaccacgttgcgtaagttcgtcaagccgaacgaccagcaccagccggaagcgaaaggaacggaaccgcgtgtgggagccgatccgttcgtcaggcagggcagtgtggcgccggtcgaaatcgtggttcccgaagatgacgaagccgccgaattctcgggagataccggggaattcgacggcgacatatattaggcggcaccgatgccttgcatgcttggctccgattgccagccgatgatgtggtttgttaccagatgcgcacgcgctgatcgggatcgagccacatgccgtcctccggcttcacgtcgaacgccttgtagaacagatccacgttgcgtgcgatgccgttcgtgcggcattcggcgggggagtgcgggtcgatctgcagatactgctccgccagctcgtcacgattcttggtgcgccagatggacgcgtagctgaggaagaaacgctgcaaaccggtgaaaccatcgatttccggcgcttcagacagcgaagcttcaatggactccgtggaaccgttcttctcacggcctgccgcctcgtcaagagcgaacgcatatgctttgagcgcaatgttcacgccactcaggtcgccgatgttctcgccgatggtcaaagcgccgttcacatgtggagcctgagctggatcgtcggcgtatttttcggcaagctgcgttggcacgaacgcgttgtactggtcgatgagtttctgcgtgagctgctcgaaattggccttgtcttcttcggtccaccagtcgttgagcttgccgtcgccgtcgtactgggcaccctgatcgtcgaagccgtggccgatctcatggccgatcaccgctccgataccgccatagttcgcggcgtcttcggcgttcggatcgaagaacggcggctgcagaatggcggccgggaacacgatcacgttcatggtcggctcataataggcgttcaccgtctgcggattcatcagccattcgtccttgtcgacgctcttgccgactttggccagctgatagccggtctcatacaagttggcggcacgcatgttctcggcaaaaccggcattctcatgtacgtcaagcgcggaatagtcacgccaatggttcgtatagccgatcttcggcacgaacttggagagcttctccaacgccttctgcttggtttcttcgccaagccaggcggagttggaaatggacacgcggtaggcgtcgatcagattgccgaccagctgttccatacgctgcttcgacgactcggggaagtgcctcttcacatattcgcggcccacatcctcgccgcaaatgccgttgaccagcgaaacgccgcgcttccaacgcacgcgctgctgcttctgaccagacaacgtcttgccatagaactcgaaattcgtctcatcgaattcgtgcggcaactccaaggtggagccgatgatcacatgcacgcgtgcccacagcttgagatcgtcgagatccgcggccttccagaatgcgttaagaccggtgaggaagctgggctcatgcaccaccacatggttgaaaatgcctcggaaatcaagcggctgcacctgagcggcggaagtctgatcatatgcggactgccaggattcgatccatgtgtcgagatcataatcggcgagcattccgctcaattccgcataatcggtgggattataggtcttcaccgaatcacgggttgccacattgtcccaatggttcgcggcgatacgtgtctccacgtcgaggaaacgctgggcttgagcttcggcctgctcgtcatcggcggcgagcttcgcgttcttcaactgcttggccaccatatcgacgtatgcttcacgaatcggcgcataatggtcttcacggtaatacgcctcatcgggcagtcccaagccagactgttcaatatggatgatgttggtttcgggagcgcccggatcgccatacacggcaatgccgatcaggtcagggccgccagccgggttcatcgcgcccaaagagcgggtgagttcagccttgtcggcagcgacgtcaatagccttcaactggtcttcaatggccgcgagtccggaagcgttgatggcgtcgacgtcaaggaaactcgcatacagggcgtgggacttctcggcagggcagtcgtcgtcttcgagaatctcacgaatctggttttcggcatcttcagcgagcttatcgaacgaaccataacgggaacgatcatcaggaagacgatacatgtcgatccatgggccgttgacatagcggaacagatcttgcgcagggccggtcacggcggagaacgatgccggatcgatacccgaattcaaagtggtactcatggcttcacactatccatctttggtgacaaaacagtgtatctgaaacgaataatcatcattccgcaacggcatgcataaggtgagatttgcataatcgtaagaaaagccagggagagccgagcactgtagggcgtacgaagtagggttagaggcatgattgaactgaaaacaccgaaagagatcgaagagatgaagcctgccggccgttttgtcggcggcattctgcgcgatctcaaggaatttaccaaagttggtaccaatctgctggaaatcgatgaattcgtgcacaagcgcatcgtcgatcgcaagggtgccgaatcctgctatgtcgactatgctccggatttcggtaccggcccgttcgcgcactatatttgcgtttccgtgaacgatgccgtactgcacggcgttccgttcgattacaacctgaaggacggcgatttggtcagcctcgatctggcgatcaacgtcgatggctgggttgccgattccgccatcagcttcgtggtcggcgagcataaggatcctgaggatctgcgcctgatcaagtgcaccgaagaggcgctcgcggccggtattgccgctgcgcagccgggcaaccgtttgggtgatgtttccgcggcagtcggcgatgtggcccgcgaatacggctatccgatcaatcttgaattcggcggccatggcgtcggacgtattatgcacggcgatccgcatgtgccgaacgatggccgcgcgcaccacggctacaagctgcgtccgggcctggtcatcgccatcgaaccgtggttcctcaagaccaccgacgaaatctaccaggatccgaaagatggttggacgctgaagagctccgacggttcccgtggcgcgcatagcgaacacaccatcgccatcaccgacaacggtccggtgatcctcaccgttcgcgacaagtgatcagacggtagcgtaaaacgcggcaaagctccaatacgacggagcgaagcgtacgaaaagaaggccgatgcccacgattattcaggcatcggccttttatatgcgtaatttcgcgcggaaatagtcgaattatttgccttgcaggaatgaagtatcggatgtcaatcgattgattttgagacgaaaccatgcttggaaacgcgcatgccatatagtgttcgatactttcgaacggttaaggagcgtgcaagtatggccacagccaatctgagtgtggaatccaaagacttcaccctgccggtggtcgaagccacggcgggtgcggacggcatcgtggtgtccacgctgcgcaacgacggctgggtcacactcgaccctggtttcctgacgactgcgcaatgcgaatcgaaaatcacgtacatcgacggcaagaactcgatcctgcgctaccgcgggtacccgatcgagcagttgtgtgagcaatccgatttccttgaggtcgcctggttgctgcgtcatggcgaactgccgaatcaggagcagtacgaccggttcatttccgacatcaaccatcgcacgatggtgggtgaggatttccgtaccttcataggttctttcccacgcaccgcgcatccgatgagcgtgatggcatccgcggtcaacgcgctcgccaccttctatccggacactactgatatcaatgattccgaccagcttgacgaggctgcgaccatcattatggcaaaggcacgaaccatcgtcagctacattttccgccgtcgccgcgatgagccgatgctgtatccggattattcgcgcggctatgtcgacgatttcctgcgcatgtgctttgcggtgccgtacgagccgttcgattccgacccgctgtacgtgcatgcgctcggacgcctgctgatcattcatgccgatcatgagcagaactgctccacttccgtggtacgtatcgccggttccgcccacgccaacctgtattccgcggttgcggcgggcatcaacgcgctgtcgggcccattgcatggtggtgcgaatgaagcggtgctccgtcagctcaaagccattcgcgattcaggcaaaaccgtcaaggaattcgtggaagacgccaaaaccagcggtcagcgtatttccggactcggccaccgcgtgtacaagtcgtacgatccgcgtgccgcgatcgccaagaagtatctgcagaagatcatggaacgcgcggacacgttgaaattgcctgccgacgagcgtgcgctgttcgacgtcgccacggaattgaagaaaatcgcgctgaacgacgagtatttcgtgtcgcgtcacctgtatccgaatgtcgacttctacacgggattgatctatcgcgcaatcgggttcgatccgtccatgttcaccacattgtttgcattggggcgtattcccggttggatcgcgcagtatcgtgagatgcttgccgatccgaacaccaagatcggtcgtccgcgtcaggtgtacaccggttataccgaacgtgattacactccgatcgaccgtcgatagttgctttttcgctgtttcatggacttgtgatgctgttcgccaagccctgcggctaaagtattgcacggaaacatgcaagtaatgcaatcactgttgtgaaggagcgaagaatgaccgatcagcgcactgcgtggggttggggtctgtccagcgtggatgcggccggcaacactttggacgtatggtacccggaactgaagcttggcgaggctccggaggaggtggcacgcccgaaccataattttggcaatctcgcccatgagggcgtcgatgcgcgtggcgtgcgccgcattccggtgttcacggtgtcgaagcttgacgaaccgatcgaagacgcagccgacgcatacctgcgtctgcatctgctgagcatgcgtctcgccaagccgaacaccctgaatctggacggcattttcgcagccctcaacaatgtggtatggaccaattatggcccgttcgcggtcgaggatttcgcgctgcgcaagcttgatgtgatggccgcggccaaccagtgcgttccgggactgccgaaggttgacgtgaacgtgctgtcgatcgacaagttcccgtgcatggtcgactatgtggtgccgaccggcgtgcgtatcggcgacgccgaccgcgtgcgtttgggtgcccacctttccgaaggcaccaccgtcatgcatgccggcttcgtgaacttcaacgccggcacgctcggcgtttccatggtggaaggccgtgtttcccagggtgttgtggtcggcaacggttccgatatcggcggcggcgcatccatcatgggcaccctgtccggtggcggcaagcttaagaactccatcggcgagcactccctgcttggcgcgaacgcgggcatcggcatctccctcggcgacaactgcgtggttgaagccggtctgtatgtgaccgccggcaccaaggtgaccatctacgacaaggccaaggtcgcggcgggcgaaccgctcgaaaccgtcaagggcgccgatctttccggcaaagacaacatcctgttcatccgtaattccgtgtccggccgtatcgaagcgcgctatcgcaagaccggcatcgaactgaacgaaaaactgcacaagaactaaatatcaaatatgaaaatctccctcattaccgtcggcaaagtcaaggaacaatatctgcgcgacgccatcgccgaatattcgaaacgactcagccgatactgcaagcttgacatcgtcgaagtggccgacgagaaaacacccgagcatgccagtgagggagtggaacggcaaatcaaagccaaggaaggcgaacgcatcgccaagcatattcgcgacgatgcgttcgtcatcgcgctcgccatcgaaggccagcagctgaccagtgaagaacttgcgcagaaaatcgacggtcttggagtgcatggcaccagccatatccaactcatcatcggcggatcgctcggacttgacccaacgattgtgaaacgggccgactacctgctgagtttttccaaaatgacttttcctcatcaattaatgcgcgttattctgcttgaacagctgtatcgtgcatgcaaaatcaatgccggcgaaccgtatcataaatgacgtgcaatcaatgtcgcgtaatgcgtacacaggttcgcgagtatgatatggcaggattgcgatgcggcaaaatatggtgagatcgccgaaagataataagtagaaggccttgcctatactagtaccccgtgagtgactacagaagcgaacgcgagcagcgagaacgccgtcgccgcaccatggtgcgggcggtgtgcatcgtcatcgctgcggcgatgctgctgagtctggttattcctgctatctacgcaggtctttgacgcctttggtccggtatgatcctccccggacctgcaatcccatacgtaacgagactggttcgcggctcggcaggatgggaacgagtatgtgggtacgtggaagaagctgaggattgtgcgaaagccgtatgaggctccatgacagaatataaagaacgcataaagaaatgtatggtgtaaacgatggcagaatttgatttttcccaggcaatcggcgaggcgcgcgccaaatacgagtcgatttccaaggcgcttgacgtcgaccgactgaccgcgcaggccaaagatcttgaagttcaggcggccgaaccgggattgtgggacaatcccgaaaacgcgcagaaagtgaccagcaaactgtcggcagtgcagtcccagctgaagcgtctcgcttccgcaagccagcgcatcgacgacgtcgaaacgttggtggaattgggtcaggaggaagaagacgccgacacgttggcggaagcgcagtccgaagtcgaaagcattcagaacgatctggccgacatggaaatccagaccctgctcgacggcgaatatgacgaacgttccgcagtggtgaccatccgctccggcgcgggcggtgtggatgccgccgacttcgctcagatgctgctgcgcatgtacctgcgttgggcggagcgcaatgggtataaggccaaggtcatggacacctcctacgccgaagaggcgggcatcaagtccgccaccttccaggtggatgccccttatgcgtatggtcgcatgagcgtggaaggcggcacacaccgtttggtgcgtatctccccgttcgacaaccaaggccgtcgccaaactagcttcgcggcagtggaagtggtgccgctcgttgaggcgaccgatcacatcgacgtgcccgattccgaaatccgcgttgacacctactgctcctccggccctggcggtcagggcgtgaacaccacgtattccgcggtgcgtatcacccacattccgaccggcatcgtggtgaccatgcaggacgagcgctcgcagatccagaaccgtgccgctgccatggccgtgctgcagtcccgactgttggtgctgcgccacgaagaggaagccaagaagaagaaggagctcgccggcgatatcaaggccagctggggtgaccagatgcgttcctacgtgctgcatccgtaccagatggtcaaggatctgcgcaccggctatgagacttcgcagacccaggccgtgttcgacggcgatatcgacgcgttcattgaggccggcatccgttggcgtcatgagcagcgtcgcgcggcggccgaagaggcggacgcctaaaaaccacgattaccgtaatcagaacagcacatagtggaggggtacgacgatggcgctgatttcgcttgaacatgtgagcaaggtgtatccgaaaggcaccaggcctgccttggatgacatcaatctcgacattgatcgaggggatttcgtgttcctcgtgggcgcttcaggttccggcaaaaccacattgctgagcctgttgctgcgcgaggaggaggtcacggatggcgagattcgcgtcgcaggtaatgatttgaggcgcctgtcgttaaggcaggtgccgcattaccgtcgttccatcggttttatcttccaggattacaaactcctcaacaacaaaacggtatgggagaatgtggcgttcgcgcttgaagtgattggcacaagccgttccaccgtcaaatcgttagtgccgaaagtgctgcagactgtcggtctcaccggtaaggaaaacaactatccgcacgagctttccggcggtgaggcacagcgtgtggccattgcgcgagcgtatgtgaaccatccgcagattctgctggccgacgagcctactggaaatctcgatccgaccacatcgctgggcattatggaagtgctggacgccatcaaccgcactggcaccaccatcgtcatggcaacgcataacgaggaaatcgtcaactccatgcgcaagcgtgtggtcgaactgcataccggcaaaatcgtgcgtgacgagcagcagggatcctacgattccgcactgtacttcccggatgccgaagtcgaatccaaatcgcatcaggcgttgaacggcggcgacgtcgactcgaaatatcgtgcgccgggcgcgcttgaaatgtctgatttttccgatgaggcggtggacgtggaaggcgcgacgcgagccgaaaccgcggcgaacgcggttgatgccgtagctgcggccatccacagcggcaatggtgatgcgggcatcgcgcgtctcgccaattccgtgcattccggtcgcaccggtcgttatggcgaggcgttcgctccggtggagactacgctgacctggggcaagggactgaaacttgaggatcttgccgaacaggagcatgccgattcggctgcacgttcgcagaccgaagccaatgccgacgcgactggctcttcgcctgatacaggcatggaatcaagcaaagcggctgaaaacgagcaatccgcggagccaacggttcccgctcctccggcactgccgatgcctcccgctccgcccgcgcctccggctcctccggcagcgcccgccgcgactgccggtggcgaggcgaaatccgtcgaacaatccgatgaacagcatgaaacgtccgaaagcaaggagaacgactgatgcgtttgcgtttcattctttccgaaacctggagcagcctcaagcgcaacgtgcccatgttgctttcagtgatgctcgttacattcatctcgtttctgtttatcggcgcatcggtgctcactcaggcgcagatcaccaaagccaaaggcgattggtattccaaggttgaagtggtggtgtggatgtgtcccgatggcaccagccaatccgtgaactgcaccgcgggaaccgcggcaacgcagactcagatcaatgacttgcagaaaaccattcgcaacgagcttgccgatgatgtatcgcaaatcacttttgtaagcaaggaagatttctacaacgacactttcctcaaacaatatccgaacggtgaatatcaggggcgtacgctcactgccgacgatatgcaggattcattgtggctgaaactgaagaatcctgagaaatatcaagtcgtttccgaagtgctttctggcaaggagggcgtcgatactgtcagtgatcaacggcagatttttgagccggtgttcgcagtgctgaatcgtgcgaccattgcaaccgccgcattggccgcggtgatggtggtcgtcgccattatgctgaccggtaccacaattcgcatgtctgctgcgtcacgtcgaaccgaaacggagatcatgcgtttggtgggtgcttcgaattggaccattcggctgccattcattcttgaaggggtgatcgcatcaatggtcggctccttgctttcctgcgtcactttatcggcattggtgaaggtatttatcactgattggcttgcagcctccgtgaaatggattccatatgtgaatcagatgacggtattgtggatttcgccgattttggttgcaggagcggtgctgttgtcggtgattgcatccacagtgtcgttgcataggtatttgaaagcctgagaacattccgttttgtacggattggatacgtttatctgtgtcgcgttttaagcatgggatgctatggtatggaaccaatgatgggaggcaagtgaccgaatgacaagcaagaaagctctaaaaccggccgtcgcggtgtttgcaacgggggctttgtgcgccacgatggcgattgccccgttctcgtctgcggttccgcaggcgcaagccaatacatacagcaatctggtgaatgcccagaataagaaggctgccagctctcagcgtgaagcccagttgcgttcacagctttccggtgtgaagtctgatttggccgacaagatcgtcgagctggatgaattgacaaatacgaaaattcctgcagctcaagctgcagtcgatgaggcaaatgctactgccgcttcggcacagagtgaagctgatgctgcggcttcccgtttggaggccgcgcaaaaagataaggaaaacctcgaagcgcagatcgaacagaccggcaaggattatgatgacgcgcatgcggccgtggcacagatggctcgcgaagatatgcacggttctgatgcgtccactgtgatgagtgtggtgacgggttccacgagcactcaggaattcattaattccatgcagtctcgtgatgcgttgagtcgtaccgaagccaatgcggcaagtgatgcggcgaatacgttgaatacgtcaatgaatcgaagcgagcgtctttctgcaatcgagaagcagatcgccagtctgaagaccgcggcagatgaaaaggctgcttctgcgcagcaggctgctgcttctgcgcaaactcaacgtgatgcgctcgaccagttgcgcgcggaaggagaaacccgccgtgccgaattggaaagccagcagtcgcagctgaacagtgatgtggccaagcaggcggcgcaaacggttatgttgcagtcgcaggtcgattccttcaatcgccagtatgcagccgagcaggccgccgcagccaatcaaaacaatggtggcaatcaagggcagacccggccaggcaacaacaataccaataatggcggcaacaatgtgactcctactcctactcctactcctactcctactcctactcctactcctactcctccgagcactaataacaattccggtcagggaacctccaacggcgattatggcaatggttatgtggccggccaatgcacgtggtgggcgtatgagcgccgtagacagatgggtatcggaaccccctcgtacttgggtaacggtggccagtggtacgctaccgcaccgtcgtatggtcttcgcgtggatcatagcccgcaggtcggtgcggcaatctccttcctgcccggtcaggctggtgccgatggcttctacggtcatgtgggtgtggtggaagcggtgaatggcaacaccatcaccatttccgaaatgaacgcggctggtggcccatatgtggtgtcgtaccgcacactgtacaacgcgtcccagttctggtatgtgcactgattcatcaaggagcgtttgagctttccttgagcgttgtgtcgcgggagcgcgccgcctgaatcgttgggcggcgcgctcccgtgatattgtcgattgttgcgttgcagaacacttctttgaagaaccggaaaggaggtccgacatggccaaggagcaaggcgtgaagccgattgcgcaaaacaagaaggcacgccacgactatgccattgaagacaagtatgaagccggtctggtgttgaccggcactgaggtgaagtcgcttcgagaaggccgcgcatcgctggccgaatcgttcatcaccatcgaccgtcgcggtgaaatgtggcttgagggagccaatattcccgaatatctcaacggaacgtggaacaatcatgcccctaagcgcaagcgtaagctgttgcttcacgcggcgcagatcgacaagctggctcgtcaaagccaagccaagggtttcaccatcattccgctgagcctgtatttcaaagacggtcgagtcaaggcggaaatcgcattggcacgaggcaagaaggaattcgacaagcgtcaggcattgcgcgaggagcaagacaagcgtgaggccttgcgtgccatgcgatatgccaacaagcaggtgcgataagtggtaaccggaaaatttccggtttcacatactgatataaagcggtggccgtaatctttttgtagcttgccctctctagtgtatggttcagattcggtcgaatagaccgagcgagacataggagaagtatatggaagcgaagaaaagtctgaaggcggttgccgcgtgtgcgctgagcgttgcgatgctgtttgctggagcggcatgcggcaccagtgatggaagcgacgatgcggcttcgtccgatagcggttcgaaatcgagcgaactgacgggttatgacgtttcgtcggtgcagaaagacgatgacatcgccaaactgttgcccgattatgtgacgaaggacggcaagctcaccatcggcatggacacgtcgtatgctcccgccgaattccttgcggaggacggcaagaccccggtcggcttcgatgtcgatatcgccaaggctttggcgcaggtattcggccttgaggcggatccggaaaccgcgaatttcgattcgatcattccatcggtcggatccaagtacgatatcggcatttcgtcgttcaccgtaaccaaggaacgtttggaagcggttgatttcgtaagccattttgatgccggatcggcatgggtcgtgaagaagggcaatccgaacaagatcgacacgtccgatctgtgcggcaagaaggtggccgtgcagaccgccaccatgcaggagaccgaagcgaacaagatagccaagcaatgcgaggccgacggcaaggataagcttgaagtgatctccagcaagctgcagaccgatgtgaccacgaacgttgtcaccggcaaggccgacgtgttctatgccgattcgccggttgcgggctatgccatcgcgcaaaccgatggacagctggaaatgctgggcaaggtcgaaggcgtcgctccggaaggcatcgtcatcaaaaaaggcgacagccagatggatgaggccgtacagaaggccgtgcagaagctcatcgacgacggtacgtatctgaagatccttaagtattggggtgtcgaggacggtgccatcgaaacgtcggaaatcaatacgccgggcgccgaataattccatgattgaaccgtccgcggatcagacggttcaaggatcgcatgactggcgacgtgctgggaacaaagcgggttttgatcatattgtgatatggcaaaacccgctttttcgtaaggaaaaaaggcatatcgaatagagtttgcgtactattaacgcggccgtagcaatcgttttctagggtgcgtgcagaacttcggttcggccgtttttatacggtcgggaatgaagagatgattcgcgatggctttcaataatctaaggaaactcactgtttttgcgctaagcgccgccatgatcgtttcgttgggtgcgtgcggcacatcggaaaagtccgattccacggcttccggtgattccaagtcgtcgtcgaacgtcaccggttatgacgtttccggtgtgacgaaggatgctgatataaccgcaatgctgccggaatcagtcaccaaggacggcaagctcaccatcggcatggacacgtcgtatgctcccgcggaattccttgcggaggacggcaagaccccggtcggcttcgatgtcgatatcgcgaaggcggtgcaggccgcactgcagaagctcatggatgacggcacgtatatgaagatcctcaagcattggggcgtggagaccggagcgatcgacaaagccgaaatcaatccgaccgacctcggctgaacgatcaaacgtaaggcaggtatcgtacgcggtgatactgtgatgccgatatgacggaaggcatgcggaccgaatccgcgtgtcttccgtttttcgtatatgaattttccgtgattcttggctggtgcgtaggttttgcgcaacgtaacgtacatgtagcattgcgctcttatcgtgcctatttgagatactgaggttctctgcaatcgaatggcgttgagattctcggtatggcaatgaagagataagaagaaggatatgcgtatcatgtctttgaagatcaagtccgttgtggcgcttgcgctgagcgcggcgatgttgttttccgctgccgcttgcggcacctccgatgcttccaagtccggcgattcgtcggattcgtcgaacactaccaccggttacgatgtcagcactattgaaaaagatgacgagctggccaagctggtttcgtccagcgatctggtgaaggacggcgagctttccgccggtatggagctttcgtacgctccggctgaattctatgccgaagacggtaagactccggtcggctatgatatcgacatgaccaaggccatcgccaagacgcttggtttgaagccgaacatcgtgtcttccatgttcgacaccatcattccttccattggctccaagtatgatctgggcatcaccgccatgaccatcaccgaagagcgtatgcagtccgtggatttcgtgagctactaccgtgcgggttccacgtgggccgtgcagaagggcaatccgaagaagctcgacacttccgacatgtgcggcgcgaagattgcagtgcagaccggcaccgtgcaggaagaggaggccaacaccatcgccaaaggctgcgaggccgataacaaggccgaagtgatgtcgtacaagcgtcaggccgaagcggccactgcagtggctacgggtaaggccgatgcgttctatgctgattcgccggtcgctggctatgccatctcccagaccgacggacagcttgaagccttgggtgacgtcgagggcgtggccaagcagggcatcgctgtcaagaagggcaatacccagcttgctgaagccgtgcagaaggccgtacagaagctgatggacgatggcacgtatatgaagatcctcaagcattggggtgtggaatccggcgctctcgacaaggctgagatcaacccgaccgatctcgactgatctcatccccactatttacatcaacaacggaggaactgaagcatcatggcgaagaaacagatcgacggcgacggcctcgatattccgaatcgcatcaaggcgctgccggttaagcgtacgggcccgattgtggcggcggtcatcgtcgctctgatcgccgccatgctgctgcagggcctgattaccaatccgcgtttcgaatggaatgtggtctggaagtacctgttcgacgagaatgtgcgcgaaggcatcaaatacacgttgctgctgacggtcatctccatggtcatcgccattattctggcagtgattctggccgtgatgcgcaagtccatcaatccggtgctgcgtggcgtgagctggttctacatttggttcttccgtggcacccctgtgtatacgcagctggtgttctggggtctgttcgccgtgttggtgcctcgcatcggcgtgggcattccgttcacttccattgaattctggagcattgactcgcagtccgtcattaccgcgttcaacgcggcatggctgggtctcgcgctgaacgaagcggcatatctggccgaaatcgtgcgtgcgggtcttgaagccgtcgatccaggtcagaccgaagcggccaaggcgctgggtatgaagcgttccatgatcatgcgtcgcgtggtgcttcctcaggccatgcgcatcatcattccgccgaccggcaatgagttcatcggcatgttgaagaccacctcgctggtcaacgccgtgccgttcacgctggaactgcagttcgccaccaccgcaatcgcaacccgactgtacaagccgattccgctgctgatcgtggcctgcatctggtatttggtgatcacctccatcctgatggtgctgcagtctcgtctggagaagcatttcggcaagggcttcgatgcacgaccggccggcgcgcgcggcaagcagccgccgctgccgggtaaaaccgaaggcgaaccgaaagacgatatcgccaagcagaacgaggcaacgttcgcgggcatgaccgcgtgaggggagtgagcaatgactgaaccaaccaccaacggtgttgttcccgcagtgaaggccacgcaggtgcataaggctttcggtagcctgcacgtgctcaagggcgtcgatatgacggttatgcccggctcggtgacggtgattctgggaccttccggttccggaaaatccacattcctgcgcctgatcaaccagttggaaacgctgaccggcggcgaaatcgacgtcgacggcgaaatgatcggctataagtatgtcgatgagggtggcaagcaggtgctgcagaccttgaacgacaaggaagtggccgaacagcgttccaagctgggcatggtgttccagaggttcaacctgttcccgcacatgacggctctcgaaaatgtgatggaagcgccggtccacgtcaagcacatggataaaaaggaagcccgcaagcttgccatcgaagagctgaaccgagtgggcatgggcgatcgccttgaccactatccggcacagctttccgggggccagcagcagcgtgtggccattgcccgcgcactcgccatgaagccggaaatcatgctgttcgatgagccgacctccgcactcgatccggaattggtgggcgaagtgctgaacgtcatgctgtctttggcgaaagaaggcatgaccatggtggttgtcacccacgaaataggctttgcacgcgaagtcgccgatcagatcgtattcatggacggcggtgttgttgtggaacagggcggtcctgaaatcatcgacaatccgcaggaaccacgattcaaggacttcctgcagcacgtgctgtaaatcgtcgtaagtgtaatcgtaagagtcagacatctcttcgtcgcaagaattgcgattaagggaagagctgagaaaatccccatgttgaaaactgtcggcatggggatttttgtgtccatatatcaaaggttcggcgcgatgagacggtttcgtttcgaaaatgacaccattacccgataagctggggtgttatgtgtggaatcgtaggatatgcaggaaatgtggaaaccgcgtgcggcaagccgttggaagtgtgcctccaaggcctccagcgtttggaataccgcggatatgattcggctggtgtggcgctgaccgcgcccggcatggaccatgtggaagtgcgtaagaaggcggggcgtctcgccaatctgatcgaagacgtggaacgcaatccaatgccgatggccaccgtgggcatcggacacacccgttgggccaccaacggcgtgccgaacgatatcaacgcgcatccgcatacctcgcgagacggcaaggtcgccatcattcataatggcatcatcgaaaacgcctcccaacttcgtcttgatctgcagacggaaggttaccgtttctcatcggaaaccgatacggaggtcgcggcgaaactgctgggcaaaatcagtgagaaaatcgttgcggaaaccggcaaacccgacctgttcaaggccgtgcgacgcttggctcgcatgctggaaggcgcgtttacgattctcgccactgactgccgtcagccgggtatcgtggtcggcgcccgccatgattcgccgctggtggttggtcttggcgaaggtgagaatttcctcggttccgatgtggccgcgttcgtggcctacacgaagcgtgccatggaaatcgaccaggatcaggccgtgatggtgtccgccgataaggtcgtggtgtctgatttcatgggcaacatcgtggccgatccgaagacctacaccgtggattgggatgcttccgcggccgaaaagggcggttgggactccttcatggacaaggagatccacgaagggccggcggcggtgcagcgcacgctgttgggacgtcttggcaaggacggcaatctcaatcttgacgaggttcgcatcgacgagcatgatttcaaggcgatcgacaagattatcgtcatcgcctgcggtaccgctgcctacgcgggcatggtggccaagtacgccatcgagcattgggtgcgtattccggtggaagtggagcttgcccatgaattccgttatcgtgatccgattctcaccccgcgcacgttggtggtggccatttcgcagtccggtgaaaccatggacacgctgatggcattgcgccacgcgcgcgagcagggttcgaaggtgctggccatctgcaacacgcagggcgcgtccattccgcgtgaatccgacgcggtgctgtacacgcacgctggtccggaagtggcggtcgcctccaccaaggcgttcgtggcgcagattactgccgcctacgtgcttggcttgtatttggcgcaggtcaagggtgcaatgttccgtgacgagatcgcgcaggcgttggattccctcaaagacatgcctcgcaagatccagtgggttcttgacacacaggccaagaccgtgcatgatgctgccgcacagatggtcgatgcgaagtccttcctgttcctaggccgtcatgtcggctacccggttgcgatggaaggcgcgttgaaattgaaggaaatcgcctacactttcaccgaaggcttcgcggccggcgagctcaagcacggtccgatcgcattggtggatgaaggcgagccggtagtgttcattgtgccgccggcacgtggccgcaatgtgttgcacgccaaggttatttccggtatcgaagaggtcaaggcccgtggcgcgtacattatcgccgtggccgaagagaacgatcccgatgttgaacgctatgcggacgtggtgttctggcgtccggcctgcccgacgctgatgagcccgctggtggatgtggtgccgctgcagctattcgccatggacatggccaagctgaagaattacgacgttgacaagcctcgtaatctcgccaagtccgtcaccgtggagtaatcgttcatacgatgcgtcaacagcgtcagcagaagaggcatcgttacgttcttgaagaacctcatattccgttcgaatatggggttctttacgagaacgatgcgattatcgtggttgacaaaccgcattttctcgccaccacaccgcgtggcatgtggtatcgcgaaaccacgttgatccgacttcgggaacagtatggcgaacctgatattgttcccgcgcaccgtttggaccgacttaccgcaggcatcgtcgtatttgtgcgcaaaccggaattgcgtggcgcttaccaaatgctgttccagaatcgcaaaaccatcaaaacctatgaatgtttggcgccacttgcccccgaacagcatccgcagtacggaacaatcgtaagaatcgacaggcatcaaccttttccggcgatccgagcatcgcatatttgcaaggatcgcgggcgacttcaggcgtacgaaattccggaaaccatcaatgcgcaaacgttgattgagcggggaagcacggtacgttgcatcgacggcaaagcatatgtgaattatgtgctgcacccgaaaaccggcaaaacgcaccagttgcgtgtgcatatgaattcgttgggattgccgattttgggcgatgatttctatccggatattgtgcagcgttcttacgatgatttctcgcagccgttggaattggtggctcgtgagttgcgtttcgacgatccggtgacaggggagcctcgtacattcgtttcgaaagtgccgcttggctgattaacagtctgatcagcaggtattgctcactgaataaagatatataaaaactgttcatcgctgtactcatatttgctcgcatcgctatggcgtgttaaagttgcgtgtccctataattggacactttacatttcgtgttatcgagcgtgattaggatgtgctcttgttgagctggctggcaaaggcaagccggctggaaagaacgagagagaatatgaaccatatttcgaaagcgcttcgtggcgttgccgacaagtataacggcgtatcactgattatccgcattatcgtcggtcttatcgcaggtaccgcactggcattgttcgttccgcatatgacgtggatcggcgaattcggcaccctgttcgtaagcgcattgaaggccgtcgctccgattctggtgtttgtgctggtggcaagcgctttggctcaaggcaattccaagcttgacagccgtttcggcacggtgcttttcctgtatctgttcaccacgttcctgtccgccgtagtggcggtgttgacgtctcgcatgttcccgcagaccatatcgttgggcgatgccgctgacgccgatgtggtgccgcagggcttgagcgaggttgtgcagacgttgctgaccaatatcgtggccaatccgattcaggccatgatcgacggcaactacatctgcattctgatgtgggcttgcctgttcggtcttgccatgaagggtattgccaatgaaagctccaaggcgttccttgccaatgtggccgatggcgtgtctcaggtgattcgttgggtcatcaatctcgccccgttcggcattatgggcttggtgttcaccagcgtttccgaaaacggcttggcggccttcaccgagtacggtagcctcctgctcctgctcgtcggcaccatgctgctgatggtgctcgtgttcggcccgctggtcattttcctgtacctgcatcgcaacccgtatccgctggtgtaccgctgcttcaaggaatccggcctgaccgcattcttcacgcgttcttccgctgcgaacattccggttaacatgcagctgtgcgagaagcttggtcttgataaagacatgtattccgtgtccattccgttgggcgcaaccatcaacatgaacggtgccgccatcaccatcaccatcatggccatggccgccgccaatacgatgggcattcagatttcgttgccggccgccattcttctgtctgtggtgtcggcgctcggcgcatgcggcgcttccggtgtggccggtggctcgctgctgcttattccaatggcctgctcgctgttcggcatcagcaacgatatcgccatgcaggtggtgggtgtcggcttcatcatcggcgttattcaggattccgtggagacctgcctgaattccgcttccgacgtggagtttgcggcgaccgccgaatatcatgcttggctcaaacagggtcgtcagcttcctgcgttcatgtattccaagaaggaacgccagcagctcggcatcgaagcctgatctcattcattcagtttccggcttctgtatacgaaaagacgtcttttcgattgtgttttgcaacacatctgaaagccgtctttttgtttatgttgtttgatttctgggattcggacttgcggtaattgtcgtcaaaagataaatttgttagggaagctaacaaaaaacaaaggagtggatatgactcaacgtagagcctatcgttggccgcagccgttggctggacagcaggaacgcatctggtacggaggtgactacaacccggaccagtggcccgaggaagtgtgggacgatgacgtccgtctgatgaagaaggcgggcgtgaacctcgtgtccgtcggcatcttctcatgggcgaagatcgagacgagcgaaggcgtgtacgatttcgactggctcgaccgcatcatcgacaagctgggcgaggccggcatcgccgtggatttggcgtccgccaccgcttcgccgccgatgtggctcacccaggcgcatcccgaggtgctgtggaaggactaccgcggcgacgtgtgccagcctggcgcgcgccagcactggaggcccacgagcccggtgttccgcgagtacgcgctgaagctgtgccatgccatggccgagcattacaagggcaatccgtacgtggtcgcgtggcatgtgagcaacgagtacggctgccacaaccgtttcgactattccgaggacgccgaacatgcgttccagcagtggtgcgaggaacgctacggcaccatcgatgcggtgaacgatgcatgggggaccgcattctgggcgcagcgcatgaacgacttcagtgaaatcgtgcctccgcgcttcatcggcgacggtaacttcatgaacccgggcaagctgctcgacttcaagcggttcagctctgacgcgttgaaggcgttctacatcgccgagcgtgacgtgcttgccgagatcacgccgaacctgcccctgaccacgaacttcatggtgtccgcgtccggttcggtgttggactacgacgattggggcgacgaggtcgatttcgtgtcgaacgaccattacttcattccgggcgaggcccacttggacgagcttgcgttctccgcgagcttggtcgacggcatcgcgcgcaaggatccgtggttcctgatggagcattccaccagcgcggtcaactggcgtgagatcaactaccgcaaggagcccggccagctggtgcgtgattctttggctcatgtggccatgggcgcggacgcggtgtgctacttccagtggaggcagtccaaggcgggtgcggagaagttccattccgcgatggtgccccacgcgggcgaggattccgccgtgttccgcgacgtgtgcgagctgggcgccgatctgaacaaactgtccgacgagggcattctgggatcgaggctcgcgaagtcccgtgtggccgtggtgttcgactacgagtccgagtgggccaccgagcataccgccactccgacccagcacgtgcatcacgtggacgagccgctggcatggttccgcgctttggccgatcagggtgtgaccgccgacgtggtgccggtgcgtggcgcctgggacggctacgagatggtcgtgctgccgagcgtatacctgctttccgaggaaacgacccgcagggtgcgcgattacgtcgtgggcggcggtcgactggtcgtgacctactacacgggcatctcggacgagaaggaccacgtgtggctcggcgggtatccgggctcgatccgtgacgtggtcggcgtgcgcgtggaggaattcatgcctatgggcaacgatttcacgggcgtgccggatcgcctcgagttgtcgaacggcgctgttgcgcatgacatcgccgatgtgatcggctcggtcgacgagtcggccaccgtgctggcgacgttcaaggacaatccgtggacgggtatggacggcgttccggcgatcgtggcgaacacgttcggcgaaggtcgcagcgtgtatgtgggcgcacgtctcggccgtgagggtctggcgctgagcctgcccgagatcctcgaatcgcttggcatggccgaagcgggcggaaacgacggccgagtgctgcacgtcgaacgtgagggcgcggacggttcgaggttcgtgttctcgctcaaccgcacgcatgagacggtccgggttccggtggaaggcgaagtcgtggtctcctcgttcgtggacgtggacggcgaaacggcctcgattaaaccgaacggcgtgatcgtcaccaagaagtaagcaggcaacaagcaataatcgcaatgcaatatgggcgtcggcaagtcaaccaatcgttgattggccgacgccctattgttttggattgcgcattcggattgcgtggctgaaatgaagaaatcgaaaaatagcaagcctttattcgggtgactgacgtacactcaaatgcgtatgtctacgtacgttttcgtacgaaaacgtcaaacggaaggaatcggcttgaaactggtgaaacgactcatcgccatctgctgtgcggccatcatgacggccagtgcggctgcatgcggagccaacgtcgattcccgaaccgaaatcaccgtatggtcgtgggagccgagcatgaaacaagtcattgccggtttcgaaaaggaaaatcccgacatccgcgttatttggaagaacacaagtggttacgacaatctcaacaacgccattcaagacggttacggcattcccgacgtggtgcaattggaatactatgcgttgcgccagtacgcggtaagcggccagctggtggcgattaccggacgtaccgaaggctacggcgatttctacacgcccggtacgtgggcttcggtgcagctgaacggccgcgtgtacggccttcccatggattccggtccaatggcgttcttctacaacgacagcgtgttcgagcaggtagacatcgatgcctccaagattcgcacgtgggacgactattacgaggcggccaaaaagctgaaaagcatcggcgtgtacatcgcagccgattcgggtgacgccagcttctacgacacgatgatctggcttgccggaggccgtccgttctccacctccaacgacggcaaaaacgtgacgatcaacctcaccgacgatgagggtacgagaaccttcaccgaattctggcagaaaatgatcgacgaaggtttggtcgccaccaatctgaccatatggtccgatgagtggaaggaagccgtgggggaggggaaggtagcctccatgttctccggtgcttggctgccgtcgctgctcatgtcgaaccttcccggaaccgcgggtttgtggcgtgtggcacagatgcccacgccggatggcagttataccacgtcggaaaacggcggttcggcactggccgtgttgcagcgttcgcgcaaaccggaagcctcatatcgtttcatcgaatacgcatgtcataagtcggagggcatcaaagcgcgtgtggacggcggcgcgttccccgccgacaacaacacgttgtccgatccggaattcctgcgcaaaaccacggtgaccgacgagcgtggcatcgaaataccgtatttcggcgggcaggaatacaatcgcgtgctttcccaagccgcggaaaacgtgtcgaccggttaccagtatctgccgtttgaagtgtatgcgcgaagcgacttccgcactaccgtaggcaaggcctacaaatggtcgagccggttgcgcaaagagcaggacaggctgaatatcatcgcggccggtggcaaagtgtccgacaaatccgccatcggcgacgcgttgaaggaaactgattccgctgatcgtctcaaattgaaaagcggcatcgcgctgtggcagaaggatttgaaggaatacggagccaatcagggctttactattcagtaaatagttaattatttgctatagttgtaaaaataatgatggctgtcttgtttttcttttgaattcaagacagctattattattatgtattgagattgtatgttgacgaaaagttattgtcgtacgttgcgttcgtaaatatgcagcatgcctttgaaaatcagatcagggtcgtaaatgtcgatcatatcggtatcgtcggcgaacacgcggcttaatccgcccgtcgcaaccacgcggaaatcctcgtcgatttcacgatggaattgcgtgatcgtacgttcgatgccgccaaggaagttgtaatacaggccggcctgcatggctggcctggtgcttttcgccagaatcgacgaggggcgcgtgatctccacttccggcaactgggccgtggcgtcccacaaggcggccgcgcctgtgcgaatgccggtggtgatgagcccgcaaatcaccgacgcatcggcggtcacatagttgaatgtggtggccgtgccgaaatccgccaccagaatcggcccgccatactcgtagtaggctcccgcacagtcggcaatgcagtccgcgcccatattctgcggattgtccatgcgaatattgatgccggttttgactcccggtccaacaatcatcggatcgatattgaggaatttcacaatgctggcacggaacgaatgcatgaccttcggcaccaccgacgtgatgatcacatcgtccacatcgcccggcgcatagccgctcagccgcaggaattgcatgatcatcaggccatattcatccgacgtatggttcgccttcgtggtgatgcgatacgtgccggcgatatgcccgtcatcgagaaagccgatcaccacattggtgttgccgatgtcgactgcgaccagaagcatgtcgaattctccttacgattgctgtattgacgctatttcctgtgacgttggttgatagttacgatgcttgcgattcagcggattcggtattgcgcaacgctgccaattcggtgaggatgcgttccgccaattcctgcttgctcatcttgttccaatgctcgatgatcggtttgtcggtggtttcgccgggtttcagcacggtcaccacattcgtatccaccgcgaatccggcgccgggagtgttgagattgttggccaccagcatggaacaatgcttggatgtgagttttttcgctgcgttcgattcaagatcctgcgtttccatggcgaaaccgcacaaggtttgaccggcggttttatgcgcgcctgcccatgcgagaatatcgggattcgaagtgagccgcagatcgatattgacgcgcccgttcttcttgattttctccgaagactgctcaatcgggcggaaatcgccgacggcagcggccataatcgtcaaatcggcctgcgtgaaatgctcttgcaccgcgttgaacatttgctgcgcggtggtgacgtgaaccgtatcaatgccgcggggagcgctcaatgtgacagggccggataccagcgtcacatccgcgcccatatcgcgtgcctgctcggcgatcgcatagcccatttttccagtggaatgattggtgaggtagcgcacgggatcaagcggctcctgtgtgggaccggctgtgacgagcacatgcaatccgtgcaatggcaacgtttccgcgggctggttcgcacgcagcagatcagctacggcagcttcgatagcagcaggctcctccatgcgccccttgccaacatcctggcaggcaagcataccggatcccggctccacaatggtccatccaagttcacggcaggtattgagattgcgttgcgtcacggcattctcatacatgtgcacgttcatggcagggcataggatttccggtccttcgctataggcaagcacggtacttgtcagctggtcgtcggcaatgccgcatgcgattttcgcaatgatatcggcgctcgcgggagcgatgacgagcatgtccgcccatttcgcatcatccacgtgattgatatgcagcggatcggatggcgtatgcgcaacatcgccgtcattgcgctgtgctgcgaacatggacgtgcgcgtctgcgtatgcgtgagcgagctgaacgtcaacggggtgacgaactcctgcgcggccgcggtcatggtcacgcgaacctcatgtccctgcttgctccagtcggaggcgagatggcaggccttgaatgcggcgatgctgccggtcacgccgagaagaatatgcgccatagccgatattgtccttccattgacgttggcaagacttacgaaaactgcgtcaagtatatatcgaaccggctgaagcatgcggcattgcggcattgccgtcagatgaatcctgcgggcatggcggattgtagaatcagactttggtgatcgacccgtacaggcggtcaaccagaacaaacacataatcaaacaggagcaatcatgtcgcaatcttcaggtgcgtacggcgaagccgacgcaaccgaacagaagaacgaacaacacaacaatcagcccgcaggctcggcaagcaccgacgcaactttgaacgcgcgtgccaaatcaccgaaatccaaggggcccaacaagtggatcatcgccatcattgcagtgatcgcagtggtcgccatcattgtgggcgtcgtcgtattccgcaacaacagcgcatccagcgataccgcggaaaatggcacctccaacaccgtgaccattggactgaaactcgcccccgtaagcctcgacattcgccaccagtccggatcggcgatcgaacaggtgctgatcggcaatgtgtacgaaggactgctgtcacgcgattccgacaacaaagtgcatccgggactggcgaaaagctgggatatttccaacgacggcacaacgtatacgttccatctcaacgagaacatgaacttctccaacggagacacattggacgccgaagatgtggcctggtccattaaccagctcaaagaacagcagtattacaacgccaatcaggtcgaaagcctcgaaaaagccgaagcggtcgatagcgacaccgtgaagctcacgctcagcacccccgattccaacctgctgtggtacctgaccggacgccccggcctggtgttcgataaggacgccgaatacaacgcgaaaaccgaagccgtcggatcgggcccgtacacggtggaatccttcgattccgccagcaaaatggtgctcaaagtcaacccgaagtattggggaagcgcacgcaaggccgcaaccgaaaacgtgatcatcaaattcctcaccgacgataacgcagccgtcaacgcgctgaaaagcggcgaagtcgacgtgctttccccggtgaacgccacgctcgccaaatcgcttgacaccaacacgtatcaggtgtccgcggcggacggcagcgacaaatacgtgctcgccttcaactgcacgaacagtaagcttgccgacaagcgcgtgcgtcaggcaatccgttacggcatcaaccatgaggaaatcatcgcttcgcgcggtaacgtcgactatgcgctcggcgggccgatcccatccgtggacccgggctatgaggacttgaccgacctgtacccgtacgatgtgaacaaagccaaggaactcatggctgaagccggctattccaccgataatccgctgaaactcaccctcacctacgccaacacgtacggcacggaactcggcgatcagctgcgtagccagctcgccaaaatcggcattgatctcaacatcaactacgtggaattctccacatggctgcaagacgtgcatgccaacggcgactatgaactctcgttggtggaccacgccgaaagccacgacttctacaagtggaccacgcctgactactacttccactacgacggcaagcaagcccaagaactgtatgtcaaggcgctcgccgccaccgatgaggaatccagtgcaaactacctgaagcaggctgcgaaagcagtaagcgaggatgcccccgccgactggctgttcggatatcgcgtgacggtggcataccacaagaacgtgcagggattccccagcaagctgagccagacggtgctgccattgtggcagatcaccaaggcgcggtgaatcgacgaaaaatcgatggaaaacaagtgatgaaaactgatgtgtggcggtgtttgcggcggcagtgttgctgcatcgccacacactggcgcgatattgttgggtagggtaatgacggtgagtaatgggtgcggattgttgcagacgcacggatcgagcgatagaccaatggtggttcaactatgagatttatagtcaaacggctgggactgttcgtcgtggccctgttcggtctgtcgctcctggtgttcgtgctgttgcgcatgctgccgggcgatgtggctgcggtgatcgcaggtacgaacgcgacccccgaacgtatcgcgtcgctacgtgccgaacttggtttggacaagtcgtacgtggcacaatacggcgattggatgctggggttgctgcacggcgatcttggtgtttccgccattggcggcaagtcggtgtcggcgcaggtagcgtctcgcgcttcggtaacgtttccgctgatcatcgtgagtttgctgatcgcattggcgattggcctgccgcttggttgcgctgctgtgctgacccgtaatgcccgcttgcgtgggctttgtcacggtattgcgattcttgccggtgccattcccgcattatggggcggattgctgttgattctgctgttctcacgcggttcaggactgttgggattgctgccggcgcaaggttttcccgataatggctggggtgcgcccttgcgggcattggcttctttgatacttccggcgctcgccaccggcgttaccgcaggcgcgtccattatgcgttacacgcgtgccgccgtgggggacaaggcctcgtctcaggcggttgacatggccatggcatgcggcatgacccgcaaacaggcggtattgcgcgtcgctttgcgtcttgccacaccgcaattggtgtcggtgatcggtttgacgttcgcccagatggtcaccggtgtaatggtggttgagaatctgttcgcgcttccggggcttggcaccatgctggtcaccgatgttggcaatcgagatctgattgcagtgcagagcgaattgttcctgttggctacgttcttcctcttgcttggattagtggttgatgtggtgcatcgtgcgcttgatccgcgtctgaaagatgccggattggtgtcgggggaggtgcttgcatgatgaaacagtctgctgagaaaactacttcgaaaaacgctgtgaaaaccgtgatttcctccatctggcgtaccgctggcggcaagtattcgctgatcatgcttgcgatatggctggttgtgtcggctatttcgctggtatggacgccatattcgctgcttgatactgacggattcaacacgtgggcttcgccgtccggcgctcacatgttgggtacggatggtgttggcgctgatgtgttgagctggctgatggccggttcccgtacgaatcttgcgatcgcgctgcttaccgtggtggttgccgcggccatcggcctgctgttggtggcggccatggtgtctcgccatagcgcattggcttccacgtcggtggttgtggcggatgcgttgatttccattccgacagtgctgatcgccttgatgctttccgtgccgttcggcgcgtcggcagcggtgatcatcgccgcatgcggacttgcatacgggctgaatttggcgcgtattctacgccccgcggccatgctcgccgcacgttctgactatgtggaatcggctttgtggtcgggtgcgagttcgttacgcgtgtttttcacgcatattgtgccgaatacggttccggtgttatgcgttcagctgtcgatgagtgcgggcacgtcgctcttggcggaggctggattgacgtatctgggtgttggcgtcggtgcgggagtgcccagttgggggcattcgcttgccacgtccgtgaaattcatcagcatttatccgatggctgtggtgtggccgggattggtggtcaccttgatggtgatagcgttgaatctgtttggcgatgcgttgcgtgacgccatcgatccgctgacgaatccggcattgcggcaaggtgaagccacccatgttgaatcggaggaacgcgcatgagcgtcagcatccgtaatctcaatatcgtcatcaatggaatgtcgattgtgcatgatgtcgatatggacatcgccgacggtgaacgtgcgggtttgatcggttcgtccggttccggcaaatccatgatcgccaaatccatcatgggcttgctgccgctttccgcacaggtttccggcagtattgacatgggtggtactgaaatcgtcggagcgtcggatcaagcgatcgccgatctgcgtggccgttatgtgggcatggtgttccagaatccttccgccgcattgaatccggtgatgaccgtggcgcagcaggtcgcgctgccgctgcgtttgcattacgatctgacccgtgacgaacggttggaccgtgtcaaagcaatgttcgccaaagtcgggctgccggaagatgtgctgaacaaatatccgcatgaactttccggcggacaacagcagcgcgtcggcatcgcggccgcattggtcacgtcgccgcgcctgattatcgccgacgagccaaccaccgcgctggattcgatcacgcaacggcagatcgtcgatctgctggcatcgttggtggacgattccggcgcatccatgctcttcatcacccacgatttcgcggtactcaatcatgcaaccacgcgctgttatgtacttgctgatggacgtgttgccgaatcaggacaaaccgccgatatcctgcagtcgccgcacactaaagtcgcttcgcaattggtgacttcggcacgtgcgctgtcgttgcggatcgatgccgaaaccaaataaggagaacggttgtgacgggcgaaaacgaaaaaaccacaatgctgcaaggtcgcggcatcagcaaatactatggtgcgaaacaacagcgtcgtcaggtgctgcacgatgttgatatcgacgtacgttcgggggagtgccttgcggtgatcggcggatccggatccggcaaaaccacccttacgcgagtattgctggggctcgaacacgctgaaacgggcgagattacgtatttcggcaagcctgtgcaaggcgaagtcgccggcgaactgcggcgtagctgcggattggtgttccaaagcccattcggctcgttggatccgcgttggagggtcggcagatccgttgccgaaccattgcggttgcatcaccctgattggtcgcaggaacggattgcggaacgcgtgtcggaagccttccgcatggtgagtctcgaccctgccgcatatggaaatcggttccccgtggacctctctggcggtcaggcgcaacgcgtggccatcgcacgtgccattgcggatcatccgaaagtattgcttgccgacgagccgatgagcgccgtcgacgtggccgcacgaacgcagattctcgcatcgttcgctgcgattcgtagcggcgaacctgatatggcgttgatcatggtgtcacacgatttgggggtggtgcagcatatcgcagatcgcattatggtgttgcacgacggttgcgttgaggaatgcggacttacggaaaccgtgttgcaccatccgaccagcgattacaccaaacgattgctggacgcggcttcgctctgatttgtgacactgcgcaaaaagcctgcgatcatgttgaaatccgcatgattgcaggcttttttgccgctatatgaacagttgagacacgccgatgtcgttacgtgtgctattgtgtgagccatgttcgatttctcatgttgttgctgtcgctgaccaaccgcccgaggggcgcgtggttcatcgaagcataacttgagacagggcattctttttcggcatacgcaacttgcgttgtatgccagagtatcgcagaaatcatcctataaccagtgccttacgcggttggtattacgcggcatatgtggatgaaccgcagcgaaaacaccatcacaggtcccgtttcaaatcattgcaagtgataaacgcgagcttctcgaaatcaaaacaacgaaatcattcatcggaagccaacggaaatcactcttcgcaaggaaaagacatgaccatccacaactccctttccgagctcatcggcaacactccgctcgtcaaactcaaccatgtgaccgacggcatcaaagccaccatcgcagtcaaagtcgaatatttcaatcctggcggctcctccaaagaccgcattgcggaacgcatcatcgacgcggccgaacgtagcggcgaactcaagccgggcggtgtgattgtggaaccgacctccggcaacaccggcgtaggacttgccctcgtggcccagcagcgcggataccgcaccatcttcaccctgccagacaaggtttccgaagccaagcgtgcggtgcttcgcgcctatggtgcagaagtggtggtaacccctaccgatgctggtccggatgatccgcgctcctactaccaggtggcggaacgcctcgccaaagcgattcccggcggatatcgcccgaaccaatacgacaacccgaacggaccggaaagccactaccacaccaccggtccggaaatctgggaagccagcgaccatcaggtcacgcatttcgtggcgggcatcggcactggcggcaccatttccggcaccggacgctacctgaaggaagcttccgacggcgcagtaaaagtgatcggcgccgatccggaaggatccatctattccaatccgaacgacgtgcatcagtacagcatcgaaggcgtgggcgaggatttctatccgaaagcgttcgaccgtgagcttcccgacgaaatcgtgcaggtcaacgatgccgaagcattcgaaatgacccgccgtttggctgtggaagaaggtctgcttgtcggaggctcgtccggcatggccgttacggcagcgcttaaatacgcacgcgagcacgatttggacgaagaccagctggtcgtggtgttgctgccggattccggtcgcagctacatggaaaagatcttcaacgacgattggatgcgtgccaacggattcgccgacattgtggaacgcacctccaagccgagccttgcggaacagtatctgtaaaccgccaattcatatctcaacatcatgtccatcattcgttcaacccaaaccattcgctattttcaaggagttcccatcatgaccatctcgaccaacaccgaagccctgaacgccaccgcactcgccacccgcgccattcacgcaggtcaggagcccgacccgaccaccggagccgtggtcactcctatttatatgacgtccactttcaaacaggacggtgtcggcggactgcgcaacggctacgattacagccgttccatcaacccgacccgcaactctttcgacgaacagcttgcagcggttgaaggtgcgaattatgcattgagcttcgcttccggcttggccgccatcgacgtgctgttgcgtgccaccctcaagccgggagacaatattctgctgggcaatgacgtgtatggtggcacctaccgtttgctttccaaggtgttcgtgccgtggggcatcggcctcgacgtggtggacatcaccgacactgaggccgtttccgtggcgctcagccagaagcagtaccggtacatttgggtggaaaccccgtcgaatccgctgctcaacatcactgatatcgcggccacgtcagcggtcgctcacgcgcatggcaccaaagtggtggtggacaacaccttcgcatccccggtattgcagcatccgttgtcggatggcgccgacgtggtcgtatattccaccaccaaatacatcggcggccattccgacgtggtcggcggagcggtggtgctcaacgacagggaaatccgcgatgaagtggcgttcctgcagaacgcggccggagctgtgccatctccgttcgactcctggcttgacattcgtggcctcaaaacgttggatctgcgcgtcaagcagcacagtcgtaacgctatgaaggtggcgcaatggttggaaacccgccctgaagtggaacgcgtatggtacccgggactggaatcccatccaggccacgagattgccgcacgacagatgcatggcggcttcggaggcatgatctccgtgcagatcgcagccggattcgaagcggcaaagaagttcgctggtgccacggaagtgttcaccctggccgagtcgttgggcggcgtggaatccctgattgagcatccgggcgccatgacccacgcttccgtcgccggtaccacgctggaagtgcccgccaatctcgtgcgactttccgtcggtcttgaagatgctgacgatttgatcgcggatttgaaacaggcttttcgtcgtgtttgagataagatcgcagcctcgttacggttttgtgtaatccgtcaaaaaggcggaacatgcataaatcctcgccatcggatttgccaaaagcgtatattatgctatttcgaatctgcttatggcgagggttttaccatataatactttcgacaacgttcgtgttcatttacaagcgcattttctgtggaatcgaacgcccatgattatcgagacgaggcggcatgctgcaaattcaaggcatctccaaacagtataaaaccggcgacttcgtgcagcgggcgctggataacgtcagccttaacctgcgtgacagcgaattcgtggccattctcggaccttccggctccggcaaaaccacgctgctcaacatcatcggcggacttgaccactatgattccggcgatctggtgatcaacggcatttccaccaaacaatacaaaagccgcgattgggactcctatcgcaaccacaccatcggtttcgtgttccagagctacaatctcattccccatcagaccattctgtcgaatgtggaacttgccctaaccatttcgggcgtatcgcattcggagcgtcgagagcgtgcgcgcaaggcgcttgaacaagtgggtttgggcgagcatgtcaacaaaaagccgaaccagctttccggcggtcagatgcagcgcgtggccattgcgcgcgcgttagtgaacgatccggacatcgtgctcgccgacgagccgaccggtgcgcttgattccgatacttccgtgcagatcatggatctgctcaaagaggttgccaaagaccgcctcgtggtgatggtgacacataaccccgaactggcctaccagtatgccacgcgcattgtggagctcaaggacggtgtgatccgttccgactccgacccgttcgaaccagcccagaacgaaacggccaccgctcccgtgcacaagaccatgggccgcgcatccatgtcgttcggcacgtcgttggcattgagcttcaacaatttacgcaccaagaagggccgcacgttccttacggcattcgcaggatccatcggcattatcggcatcgcattgattatgtccgtttcggcaggcgtgaacacttatatcgacaatattcagcgcgagacgatgactgcttacccgatcagtatcgacgaacagaccttcgacctgaccagcatgatgacttccggtcagcagagtgcggacaatcaaggcaagaagcataagagcgacgcgatttatccggatgatgccgccatcaagggcaccgcttcgatgaccagcagcattaccgaaaacaatctgagcgcgttcaagaaataccttgataataaggacagtgacatcaatcggtatatcggttccgcgggaatccagtattcgtatgatacgaggttctccgtattctcacacgatccagacggcacgcttgtcaacgccgatggtgtgacggtgggcaaaaccggcaccaaatcgatggccgaccagatggcggatggttcgctgatgtctgccgactcgtccacctttacgtcgacgcgcgtgagcatgctcacgggtaaaaccgaccagaatgctgcaccgagctcgttccatgagatcatgccaagcgctgatggcaaaaagaacgtcggcaaggtcatttccgacaattatgaggtagtcgaaggatcctggccaaagaacaagaacgaggttgtgctcgtacttgacgagaacaattcattgtcgttaaccgctgtgtatgagctaggcctcaaatccgccagtgaataccacgatatgatgaaccagctcaattccggcgacgatgtgaaaaccgataccaagaagattgactattccgacgttatcgaccgcacgctgaagctgctgccggcctgcgaccagtatgtcaaaggcgataacggccattggacgtacgtgggcgacgatgtggaccagattaatgcgctgatcgactccgacaaggccatcgatctgaagatcgtgggcgtggttaagccggtagaggatgctgacgcaaccccgctttcctccggtgtgggctatacgcgtgctctgaccaatgagctgatcgaccgtgccgaatccagtgaaatcgtcaccgaacagcagtccgataaagaccacaatgtactcaacggcatgacgttctcgccatccgacgatgccaccaaggcccaggatgcccgcgattacgtcgcatccctcggcgtaagcagcaaggcgcagatggcgcagaacatgatggcggccgcagacgcatccggaggtgactcccagcaggccgcggccatggctcagatgggcgaacagcagctcgccgaccaattcgacgcctatatcgccaccgccgacgaggccacgctggtcgccatctacaaccagtacgtgtccaccggctcctacaacgataatctcgctgatttcggcgtggtcagccgtgacgcaccaagctccatcaacatttacgtcgacagcttcgaagacaagaattccatcaacgacgccatcgacgaatacaataagaccgccaaggaaaaagacaagatcacctacaccgactacgttggtctgatgatgaactcggtaaccaccatcatcaacgtcatcacctatgtgctgatcgctttcgtggctgtgtcattggtggtctcgtcgatcatgatcggcattatcacctatatttccgtactggaacgtaccaaggaaatcggtattctgcgcgccatgggcgcatccaaacgcaatgtgtcgaacgtattcaacgcggaaaccggcattatcggcctgctggccggtctgatcggcgttggtgccaccgtgctgctcaacttcccgatcaacatcgtgctgcaccacttcatgggtaccaccgaggtcagtgccgtgctgccggtcggtaatgccatcgctctggtgattctcagcgtagtgctcaccctgatcggcggcctcatcccaagtcgtggcgcctccaagcaggatcccgccaccgccctccgcaccgagtagaggcggtggatactagactgctgcgtatgacagagtttacgtcggcgcgtgacgccctacgcacctacttcggatatgacgccttccgtcctggtcaagaaggcatagtcaatgcgattatccaaggtcgtgatgcgctcggcgtcatgcccaccggtgcaggcaagtcaatctgctaccaaattcctgccacgcttcttccgggcatgaccgtcgtcatttccccgttgatctcgttgatgcgcgatcaggtcgacgcgctcaacgacgtgggcattccagccgcattcatcaataccacgcaaagtcccgacgaacaggatctggtgttcgtgcaggcgttgtcgggacggatcagactgctgtatgtggctccggaacgtttggaaaccgaacgtttccgcacgttcgccagtcgtgtgccgatttctctggtcgccgttgacgaggcgcattgcgtgtcgcaatggggccaggatttccgttcgtcatatcttggtatcggcgattttctgaaggcgttgccgacccgtccgacggttgccgcgttcactgcgaccgcgacggaacgggtgcgccgcgatattatcggaattctcggattgcgtgatccgtccgtcaccgtcaccggcttcgacagggccaacctgtatttcgacgtgatcaggatggaaaggaaacataaggcttcgtgggtggcttcgtatattgcggatcatcctgacgaatccggcatcgtgtattgcgcgacccgcaaggaagtggagtcacttgccgaatcgttgaatatcgccgtgcgcgagctgcgtgcggcgaaaggtgaggatgcgacgcgaatcggcacggtcgcggtcgcctatcatggcggtatgtcggccgaaacgagggatcgggcgcaacgtgatttcgtaaccgaccgtgtgcctgtggtggttgccacgaatgcgttcggcatgggaatcgacaagtcgaacgtgcgttatgtgatccaccataatatgccggaatcgatcgaagcgtactatcaggaggcaggtcgtgcggggcgtgacggcgagccgagccggtgcacgttgctgtggaatgaatctgatattgctacgaggcggaggctgcttgattcggattatgagaacgagcgtttgaccgctgaagagcaggaggttgtgcgtgcatcgaaacggcgtctgctcaacgctatgatcggttattgccgtactacggattgtctgcacgagtatatgaccaggtatttcggcgaggccgggggagcagccgtccgcgatgacggcgcatgcgtgggaggatgcgcgaactgcgggaatacgtttgaaaccgttgacgtcacggatatcgcgcgggccatcagccgctgcgtgcatgacgtgaaccagaaggtcggttcggggaagatcgtcaaagtgctgcgagggtcaaaagcgcaggatttaaactatcttcatcctgtcgatctgccgacgtacggcatgttgagcgcgacttcggaggtacagattcgtgacgtgctcagccagatggcgacggatggttttctttccatttcggaaggctccatgccgatcgttcgctttggtgaacgtgcggcggaaacggtagcgccgaattttcattatgaaatcaagaagatcgaacggaagcacgctacgaaacgtgcggaatcgccgtccgtaggctctcaggccatgggatcgtatgtgccgggcgacggagacgaggaattgttcgccaaactgcgcgcgttgcggcttgacatcgcccgcgaactcggtaaacccccgtatatcgtcttttccgataaaacgttgcgcgatatggtgcgtgtcaggccggtcaccggcgagcaattctcgcaagtcaatggcgttggtgcgctcaaattggaagcgtatggcgaacggttcatggaagtgatccgcgatttcgttgcatgaatcatgtgacgtgtcagcttgaggaataatcgtatcgattattgcaaaaccctgcgttttatatgatacgtaacacgttatcggcaacatgtatggcggtgaggttgacgtatgccggcaaaacggcgacagtagagacgaacagttgttgaagaaaggattgatgatggcagaagacaagccggttgtggaaagcttccagctcgaccacaccaaggtgaaggctccgtatgtgcgctatatcgacacgcagaccggtccgaatggcgatgtgatttccaattatgatttgcgtttggtgcagccgaatgagaatgcgattccgaccggtggcctgcacaccatcgaacatacgattgcggtgctgttacgtgaacgtatcgacggttatatcgattgttccccgttcggctgccgtaccggtttccacctgttgacgtggggtgagcattccacagaagaagtggctcgcgcgttgaaggaggcgttggaattcatcgcatacgaggccacatgggatgatgttcctgccaccaccatcgaaagctgcggcaattaccgcgaccatagcctgttcacggcgaaggaatggtgcaaggatattcttgccaagggcatcagctctgacgcgtttgagcgccgtctggtctgattcgcgcgtggttgcaagtctgcttttcgggcatattgcgaatactgtgccgtgggcatggtatttttaacgctcggaagaagacaaggcgatgcaaaggtgaacgagatgggtgaggagagcgtcattacttctgaacggcggttccgccgcgccactatggctgattggccgaccatgcagaagatttatgagcatgcccgcaagttgatggcctccaatggcaatcccacgcagtggggtgataagttcccgcgtgaggaagtggttcgtgacgatatcgaatcgcaacgcactgtgctgcttgttgatacggttgatggcgaggaacgtgtgctcgcccagttcgcattgtgtccgggcgtcgacccgacgtatgtgaatatcgatggtgcctggctggatgacgatccgtatgtgaccatccaccggattgcctcgtcgggtctcgccaagggtgcggcgaaggactgcatcaactggtgcatcgaacattacggcaatgtgcgtgcggatacgcatcccaacaacaaggccatgcagcatgtgctcgaatcgaatggttttgcgcgctgcggcttgattcagttgcttgacaggccgttcgataccactcgtatcgcctatcagcgtcatgaatggtgagatttgcggatttatatggattggtatcaatcaatataaattcatcgcaaacaatcgcaaacaatcttcgatattgagaaacaaaaatcccgttgaatatcgtatttcagatgttcaacgggatttttatatccgattgcgttgtttttgatatatcttacgaaagatatatcaaaaacaacagtattgccggtttttagaacagtcctggctcgttcaatgcggaatgcttgcggctgtacacgaaatacacaatcaaaccaagggcgaaccagattgcgaaacgcacccaagtctcccaattcaaaccgcaaatcagaatgaagcagaaaatgattgcgcagatcggcgtgaacggtacgcccggagcgcggaagccgcggtgtgcgtccggctgggtcttacgcatccacagaatgcctgcggacacgatgatgaatgccgacagcgtaccgatgttcaccaattcgaacagcacgttgatgttgatgaaaccgccggcgatggccgttagaataccgaagaaccatgtacctttgaacggggtgcggtacttcgggtgcacttcgccgaagaacttcgggaacaggccgtcgcggctcatggcatagcagatgcgggactggccgtacagctgcaccagcatcaccgtggtcatgccgatcagagcgccaagattgacaacgaacgccagccagttgagaccggtttcgagaatcacgccggccaccggagcatcaatgaagtttgcgaactccttgtatggcaccacaccggtcatgatcagcgtcatgacgatgtagagcacggtggacacggccagcgagatcagaatgccgcgcggcagtgtcttgttcggattgatggtctcctcggcggaagaggacaccgcgtcaaagccgatgaagctgaagaacacgatcgacgcggccggcacgatgccgtacggctgcgtcgagcccggctggaacgtgtaaatgccgtacggggagaacggcttccaattggcgggattgatgtaccagacggtgcacacgatgaacagcacgatgatggccagtttgatcatcaccataatatcgttggttttcttcgtctggttgatgccgatggacagcacccaagtgatgatgagcacgatcacgaaaccaggcagattgaagtatgtggtcacgcctggtgtggtgccgtatgccgcggtcagctcaactggcagatgcaagccgaaaccttccaacagtttgttgaaatatccggaccatccggcggacacggtggccgcctgcaatgcgtattccaaaatcaaatcccagccgatcacaaacgcgatcagctcgccgaacgccaaatacgcgtacgaatatgcggaaccggacactggtgccatcgcggcgaactccgcatagcacaatcccgcgaaaccgcagcagaccgcggccagaaggaaggagacgcacaatgccggacctgcggtgagggcacccttaccggtgagcacgaaaatgccggtgccgatgatggcgccgattcccagcatggtaaggtcaaacgttttcaatgtgcgtttcagcggagtcgactcggacacgagctggtccactgactttttgcgaaaaagatccatggtcttaattccctaaaaatggttttatatgggctggaccggacggatttccgggactctggcacgcctcaaacgccagaaatcaaagaagggctgaacgcctcatatacgggaggtgtacgcgccttatgtaaggagagtgtaaaaacctggcgcggacaaaaccgtgaaaaccccgtgaatcgtctcaccatgtgtgcgcgcctttccgaagccgtcacgtgggagcgcaacaatagagccatgactttcaacgctgcccgtgaatggcaattctcatccgaacaaggcaaggccaattatgaggccgcccaaaagcaatatccggcgcaggccatcgtcgatatggccgcattgcgaaacaacatgcgtcatctggtgagcgtggttggcggcccgaattccggcaccgccgtgatgggtgtggtcaaggccgacgcgtacgggcatggtcttattccggccgcgctcgcggcacttgcgggaggtgcgacctggctgggtacggcgcaatcacatgaggcgctgctgctgcgcaaggcgggcatcgggccggaccgctgccacattctgacatgggtatataacggcatggctgtgccttttgacgagctgatcgacaatgatatcgatatttccgtcggatcattgccgggcattgacggcgttgcggctgcggcgcgtcgtcttggaaaaaccgcacgtgtgcatgtgaaggtcgattccggtttcggccgcaacgggttcacgcccgccacgttcgacgcggcgctcgccaagctggtgccgctcgccaaggagggtgtgctgcatatcgtcggccagtggagccatttggcggtggcggacgctccggacgttcctgaattcgtggcatccaccgacaggcagatcgagaatttcaaggatttcacccgtcgtatggagcaggcgggcattgcgccggagattcgtcatctcgccaataccgctgccacgctttcacgttccgagattcattttgagctgacgcgcccgggtatcggcctgtatggttatgaggctgatccggccatgggcacgccaggtacatacggtttgacgccggccatgacgttgcaggcgcagcttggtacggtcaaggatgttgaagcgggccatggcatttcctatggccgcacgtacctgactccgtccgatacgtccaccgcgatcgtgcctgtcggctatgcggacggcattcaccgttccgcttccggttttgatatggaaggcgcgaagcatgtggtcaagccaggaggcccggtgcgtgtgatgaccacggaaggtccgcgcctctaccgtgtgtccggtcgcgtgtgcatggatcagtttatgcttgacctgcacggttccgcggaaaagcttggcgtgcatgagggcgacaccgtgcagctgttcggaccgggtcgcggagaggattatgccgagccgaccgccgacgattggggccgtgccgcaggaaccatcagctatgagatcttcacctgcctgtgcaaccgtatcccgcgcctgtacgagcatgcctctgacgtgctgtcggtcgaagatctcgccaaactcgatcccgcaaccctcctataaagaatcaggcgtgcgatgggaggcacgccgtgaaagtcaatatggtgggcgcggtacgttcggcggttggtcaacgtgccgcgcttgctgttaaggtggtgagctatgccaggaatgattctgaaggaagatatcgaaaaagttcgcgccaccgccgatctgtacgacattgtgtccgcaacggttacgctcaaaccttcaggaactggcacatacgtggggctgtgcccgtttcatgacgagaaaacgccaagcttttccgtacgtccggcgctcggtgtgtggcattgcttcggctgcggtcttggcggagacgtgttcggctatgtggagcatcaggagaacgtcgactttcgtgatgccgtcgagcttttggccgatcgataccatatcgaattgcgttatgaccagtcgaacgccaagaaggagcataccggttcgaaacgtgcccgcctgttggaagccaacgaggccgcgcaggagtttttcgtctcgcagctgatgaccaaagacgcgctcgccgcgcgcaaactgcttgatggccgtaatttcagccaggccgattgccaacgattcggttgcggatatgctccgcaaggctgggataatctggtgcggtacttggcaggcaagggcttcacacagcaggaaatgttggacgcaggtttggcccgtcaaggccagcatggggtgtatgactatttccgtggccgcgtaacatggccgattcgcgattcaaccggacgcacgcttggtttcggcgctcgcaagttgtatgaggatgattcgattagcgcgaaatacattaatactcccgacacgcagttgtatcggaaaaaccaggtgctgtatggcattgatatggcgaagtcggcgattgtgaagaaacgtcaggcggtgatcgtcgaagggtatacggatgtgatggccatgcatttggccggcattgataccgcgatcgcgacatgcggcaccgcgttcggtgccgagcatgccaagatcgtgcgtcgtctgatcgccgacgattcgttgggtgcggtacagctggttggtccgttgaaggttgaaggacaggcgttgagttcgcgtatcgtgttcaccttcgatggcgatgcggccggtcagaaggctgcgattcatgcgttcggcttggattccgctttttcgacgcaggcgttcgttgctgtggccgacgacaatctcgacccgtgcgatttgcgtatcaagcgaggtaatgaggcggttcgcgcgttgatcgatcatgccgaaccactgtatgatttcgtgatcaaaaccgcgatcgggcgtttcgacaccacttataccactgggcagatgggcgcagtcaaggcggtggcgccgttgatcgcacagattcgtgaccgttccctgttggatttgtattcacgcaaggcggtgcgccagatcggcgtcgacttggatatcatgcagcgtgaagtgcgtgacgcacgacgcaaactgcaggtgcgggacgaagatgcgtacgctccgaaacgtcgttttgcaggcaatgccggagctgcggtggaaccgcgtatggaacaaggcacgaatccgtatgcgaatccttccgcgcggaaggcgttggaacatcgtgatgcggcggagcaatcctactatcgcattgatgatgccgtgttcatttgcgaacagcagttcatggcaaccctgattcaagtgccgcttgccgttgatccgacactgttcgccagtcttacgctgtcgagcttcatgacccccgtattccgcacgttattccaagcggtcgcggcggccgggggactgccgtctgctgataccccgcaaggattgtggatgcacaatctcaccaaagcgggtggtccgatgttggaatccgtcatcaacgagcttgccgtcatgccattgccgcttcctccgagcgatactgacgcagaacgtgcgtcgcaacaatcgcaggaaggcaacgtgcaattgcgcaagccgaccgatgacgaacgcagatacgcgtctgaactcatcattcgactgcttgacacgggcatcatgcgcaaaatcggcgcggaccagcgtcgcatggcgcaactgccggacggtgccgagaaaatcgagctgcttggccagattaccaagctggaaacgttgcgcaaggatctgcagacgagggtgttcggcaataacgtcgcctgaatatttggtgtgccggagcgtcaacccccgaacgtctttgtcgttcacctgaatttgccacatgcctgagtgcggtatgaacagccggcgaacgtgtggtgaacgcaggaagaatacttaacgaattcttggctggtgcacggtatccttcggcgtgttttgcaattgcaaaacagttttgccggtttgcaaagtcagggaacagtaaggcgtagtggctgaaaaacgttggaatggtcggaaaaatagtatgccaagggtatgtggtacgcgatttttcgggtaaagtgaatacggcgtttcttgagtaaatcgcccgggtctgcaaacggtttgcaaactggattcacggaggaatgaatgcgacgattggtcgtcaaaatcctgaaaaacgagaccattctcgtagttgcttccatacttgctcttatttcatgctttatcgtgcctcctgacaaggagtatgccggatatattcatgccagcaccatttcgcagctgatctgcctgatgctggtggtgtgcggtttccagcgcatcggtgtgttccgcatcatcggttcgcggttgctgcatcatgtgagcaccgcccgcggattggtgatcacgctgatttcgctcacctatttttccggcatgctgattaccaatgatgtggcgctggtcacgttcattccattcgcgatcgcggtgctcaccatggctcacatggaggagcatgcggtgctggtcggcacgttgatgaccgtcggtgcgaacgtgggcagtatgttgacgccgatcggcaacgcgcataacctgtatctgaaagcgttgaccggcatgccgtccgctgaaatgattggcattatggcgccgtattccgttaccgcggcggtattgctggtgcttatcgcctgcgtggtattcggcaagaaacctgtttccgaattttcctctatcgacggcagcggcatcgaacagaatgtgctcgctccgaattccgaccagccacggccggatgagattcgtgtgaccggctatggcgccggttatggaggttggcgcacgatcgtatattgcgcattgttcatcgtgtgtttgctggctgtgagcgatttcattccgctatgggccatgtgcgtgatcgtggtggtggcattcctgttctgcgatcgccgcgtgttccgcaatatcgactggggattgccgctgaccttctgcatgttcttcattttcatcggcaatatgaaacgcgtgccggaattctacgagctggccgcctccttggtgggggcgcatccgctggaagtgtccgtggtgtccagccagttcatctccaacgtgccgaccacgctgctgctgtcaggcttctgcgatcaatggcgtgcgctgatcatcggcaccaaccttggtggcatgggtacgctgatcgcatccatggcgtcgctgatcggctacaagaacgtgacgcgcgcctacccggacaaaaaaggccgttatctggccgtctacaccgcggtgaacgtgctgttcgtcatcgtgctcgtcggcctgagctggattatcgagtagcgtttggccgtcgaccggtttccctgaccgctaatctcaaggtcgccggttcgcaccttttgctgggattgcatgaaaacccttggaatcattggatttcaagggtttattgttacgtcggctgatggtctggtgctgtgataatctgtgccgggaagcgtgtgccgagaaacgtaggaaggctgaacatgctgcaaggattgctgggaattttctccggactgatcacgccggtgcagaccgcggtgaacacgcggctcggccgttccatcggctcgccgttgcgcgcctcgctggtgtcgttcagcgtcggcctcattgcgatgctgactttgacgctgctgcttggcccgtatccgctgattcccgccaccgcggcgaacggtccatggtggatgtggttcgcgggcgtgttcggtgtcactttcctgaccggcaatgtgctgctgctgccaaaactgggcagtctcaaaaccgtgatcatgccagtcaccgggcagatcgtcatgggcctgctgatcgacgctttcggctggttcggcactaccgcgcagccgatttccccgctgcgcatcgcaggtgcggcgatcacgctggtcggcttcctgcttgccgtcgccggaccgaatctgcgattgaggtctgccatcgatcgcccggctggcggttcggaaaattccggcgattccgaaaaatccgaaactgacggaaaagccgtacatgtgccaggttccgcgaccgtgctgtggagttgcgcaggcatcgcgttcggcatgtgttcggccgtgcagacggcgttgttgggcaagctgggcgtcgcgttgggatcgccggtgaaggcatcgctcgcctcgttcgtggtcggtctgatctcgcttgcgatcgtcgtcgcattcgtcgaccgcacctacagcctcggcgacgcgctgaagaaaggcaatccgtggtggatgtgggtaggcggattgctgggtgcgacgctggtgatgtgcaacgcgtacctatccgcgcatatcggcaccggcatgacggtgatgctggtattgctcggtcaggtcggcggaggattgctggtcgaccgtttcggcctgcttggcgtgccacgcaagcccgtggccggcatccaatacgtcggcgtgctcgtagccatcgtcggcattgtgctcaaggcgatgtgattgccgtgtcgagttggcaaccatgcgtgaactgactatacttaatctggtttggccctgtagctcagctggatagagcatgtgacttctaatctcaaggtcgccggttcgagcccggccggggtcactttcaagccctcgtgccatttcgtatggtatgagggctttcctgttcattggacggcgagataggggagaccatgaagcgaatcgtcgcaggtattctggcgcatgtggacgcgggcaagaccacgttgtcggaagcgttgctctatgtcaccggccaggtgcgtaaactcggccgtgtcgaccatggtgacgccttccttgatacgaatgccatggaacgacagcgtggcatcaccatcttcaccgagccggcgatcctcgccacacccgaccttaccattaccctactcgacactcctggacacgtcgacttttccgccgaaaccgaacgtacgctcaccgtgctcgactatgccatcctcgttatctccggcgcggacggaatccaaggccatactgaaacgttatggcgactgctcgatcgctatcaggtgcccacattcgtcttcatcaacaaaatggatgcgcccggcgccgacaaatcacaattgcttgcccaactgaagaaacgcttctccgacggctgtgtcgacttcaccgagccgatcgtcgacacatgcatggaggagatcgccatgcaggacgagacggccatggacgcatatctcgacactgaaactgtgccggaggaaaccatccgcaccatgatcgccaatcgcaggctgtttccatgttatttcggttccgcgctgaaaatggatggcatcgaacaattcgtggccggttttgaacgtttcacgcaggagccgcaatatgatggcgatttcggcgcacgcatatataaggtgtcgcacgatacgcaaggcaatcgtctgacctggctcaaagtgaccggaggcgagctgaaagccaagatgatgttgagcggagccgtgcgcgttggtagcgattccacggccgacgcggtctccggcgtcgaccgatggcatgagaaagccgatcaggttcgcgtctactccggcgtgaaatccactaccgtcgatacgattcccgcaggcactgtgtgcgccgttacgggccttacccagacatttccgggcgaaggtctcggcaaggagcaggacgccggcagtccggtgctgcagccggtgctcacgtacacgctggaaccgggggagtgcgacatccacaagtgtctcgtcgccctgcgcgaattggaggacgaggatccactgttgcatgtcgtttggcagtctcgtctggaggaagtgcatctgcagttgatgggtgccgtccagctggagatcatccaacagatcatgtgtgaccgtttcggcttggatatcaccttcggtcccggcagcatcctgtacaaggagacgatcgccgcgccggtcgaaggcatcggccatttcgagccgttgcgtcactacgccgaaacgcatgtgctgctcgaaccgctgccgcagggctcgggcatggcatacgccaccgtgtgcagcgaggacgtgctcgaccgcaactggcagcgcctcatcatgcagcatttccaggaacgcgagcatctgggcgtgctcaccggctcgccgatcaccgatatgagaatcacgctgctgacgggccgtgcgcatctgaagcacacggaaggcggcgatttccgccaagccacctaccgcgcgatacgccagggcctgatggaagcgaagaagaagggcgattgccgtctgcttgaaccttggtacggcttccgtctggaagtgccgcaggacatggtcggacatgcgatggccgacatccagcgcatgtcgggcacgttcgacacgcctaccggcgacggcgaatatatggtgttgaacggcacggcgccggtatccgaaatgcgtgactatgcgatggacgtgaacgcgtacacgcacggccgtggccatttaagctgcgtgttcgccggctaccagccgtgccacaatgccgacgaggtgatcgagaacatggcttacgatccggaatccgacctggagaacacgccggattcggtgttctgcgcgcatggcgccggctatccggtcaaatggtacaaggtccccgaattcatgcacctcgactacgcctggcacggcgaagaggcgtaaaacatgtagataggctgccgacgccggactgtgcaaagttccgcgtgtcggcagttttttttatataaaaaacgcgagtggagtagatgtgtgagaaaaagaaaaccccacacgaggtggggcttggtggagcggacaacgggactcgaacccgcggtctcaaccttggcaaggttgcgctttaccaactaagctatgtccgcaaagaacttccgccgtgagaagcggaaattcagtgggtgatataggaatcgaacctatgaccccttccgtgtgaaggaagtgcgctagccgctgcgccaatcacccgtgggataattccaccggtttcccggcttcgttacccgcttcgcgtgggcgatacaagattcgaacttgtgaccccttccgtgtcagggaagtgcgctacctctgcgccaaccgcccgaagcgagtgctaacttacgtggattctcggcggaatgcaaatcgtcggcgtgtcgcgatggtgttgcgaggggtgactcgccgtcaattagcgatcgaaaccattggaatttccatggtttttgcgtctggatcggacttgacgaacgattcttcagaaggggattgcgtcaacggcaagcgcatctgatgccatgccacattgccgtgcgtcgaagcagacatgccttcgtccacgaatcccaggcgggcgtaaaatccgacaagacgttccttacaagtcagcacaatgcctttgcgtccggcaatcgtcgaatcaaggatcacacgacgcagcagatagctggcgcaaccgcgatgctggtagacgggagccacgtccacgccgaaaatcatctgccaatcaccctgctcgtcatgcatggaaacatcctcatacatgacgtcggccaagtccttttcgttggtcgtcataccgttgacgaaaccaaccaatgtgccgtcttccacagaagctgggaagcaggcatcgtcatcggcatcagtgttgatcaaaagccagaaatgttccggatatgtggcgacgcgtgcagtcaggctctcgttcgttgcggcctccgcaggtgggaaacaggcagcctccacagcctcaatcgcgtccaaatcctccatcgttgcatgtcgaatgagcatgtgcatactctctcgcaaggtatacccaatcttcacatttcaatatgggcgaacagtggaaacgccagcgtgcaatactgtgaaaggatcaccggacgtattgtcggaagctgataaacgcttatatgaaaaaccgataacgacgtggcctgttccgcgattgttgcgcggtacgatggggcgcgttcaaggctaaagcttggaaacagcctgagaaggcttcaaacgatccgcagaacattcgaaaacctagcgagaaagaggggaggcgcgtgtgttcgactggacattcgtgacgcactacgcgccgttcttcgtcaacggtgcggcgatgacgttgttcatttccgtattcggcatcgtgctttcgattgtggtcggtctcatctgcgcgggcattgaaatcgcacgcatcccagtgttgaagcagattgtgcgcgtctacatcgaactcagccgcaacacgccgttgctggtacaactgtatttcctgtatttcggtctgccgaagcttggcgttgtctggtccgcggaacaatgcgcgatcgtgggactcggctttctcggcggctcctacatggccgaagcgatgcgtggcggcctcgaaaccattccgaacgtgcagcgcgaatccgcatacgtgctgggcctgagccaatggcagaccttgagccgcgtggtgattccgcaggccatcggcacgtccatcccaggcattgtggccaacgtgatcttcctgatcaaggaatcatccgtcgtgtcggccatcgcgctcgccgacgtgatgtacatggccaaggatctgatcggcatgtactacagcacgtacgaatcgttgctgatgctggtcgtcgcgtacttggtgattctgctgccgatttcattgttcggcacttggctggaacggaggttcgactatgagcggcgctgagattctgctcgagccgggcgtgttcccgcgcctgctgcagggcctgtgggttacggtgtggatcgccggtgtttcggtgggtctttccattcctgtgggattggtcgtcggctggctgatgacgatgaaaaatcccgtcatccgtgtgctgaccaggatttatttggatttcattcgcatcatgccgcaattggcgttgctgttcatcgcgttttacggtttcgcccgtgcgtggaattggaatttggatgcgaccggcgcatgcgtgttcgtgttcgtgctgtggggcggcgcggaattgggcgatttggtgcgtggcgcgcttgagtcgattccgaaagcccagtatgagtccgcgtatgtgcttgggttgagtggctggcagacgttcgtcacagtgattctgccgcaagcgttgcgtaggcttctgccggcttcggtgaatctggcgacacgaatcgtgaaaacgacgtcgttggccgtgcttctcggcgtggtcgaggtcatcaaagtgggtcaacagatcatcgacgcgaaccgtttccaatacccgaccggaaccttgtggatctacggggtgattttcttcatgtacttcatcgtgtgctggccgctgtccatcgtggcccgccgactggaaaagaggtggtcgcatgactgatgcagcgggcaagcagactcaggcaggccaggcaagtcttgggattgcgcatttggtcaagcagtacgccaatgccgacaggccagtgctgaacgatatttcgttcgacgtgccgcatggcaaggtgtttgtgattgttgggccttccggttccggcaaatcgacgttgttgcgcaccatcgcaggccttgagccgattcagggcggcaccatttcgctcaacggcgaagtgatcgaaacgggcaagccgggcactgagtccgctggacgcagcaagcgcagcagcgaactacgcacccgcgttggcatggtgttccaaagctacgacctgtttcccaacaaaaccgtgcttggcaacatcacactggcgccgaccttggtgcagaagcgagataagggcgaagtcgagcaggaggcgatcaggcttctggaacgcgtcggccttgccgaccgcaaggattcctggccgcacgagctttccggcggccagcgtcaacgcgtggccatctgccgtgcgctgatcctgcatccggaagtgctgctgttcgacgaagtcaccgccgcgctcgatccggaaatggtgcgcgaagtgctcgacgtgatgctcgaactcgccgattccggccagaccatgctcatcgtgacgcacgaaatgcaattcgcgcgagccatcgccgaccaggtgatcctgcttgaagatggcggcattgtggaacggtccgacgatgccgaacgattcttcaccaatccgaccaccgaacgtgccaagcagttcctgcatacgtttgaattcgatcggcatcgtaaatcagccgagcaatccgaacggtccgagcagtagcgcgaaatagcgcgaatcggcgaaacccaagattttgatagcagttatctttgcaagagaggagaaaccatgaccgcatcaatcatcaacaaaacattcaagagcatcgtggccgcatcggccgcgttgatcatggcagcctccgtggctgcttgcggtccgtccgcggccactccgagcgacgaaggctccacgggtagcgattccagttccagcagcagcgccaccgcccgcactctggatgagatcaagaagtccggcaagctcaaggtcgccgtgttctccgacaaggctccgttcggctacgtcgacaaggacggcaactatgccggctacgacgtctacttcgccgagcgcttgggcaaggatcttggcgtagacgttgaatacacctccgttgacgccgccgcccgagtcgacgtgctcacctccaacaaggtcgacatcacgctggccaacttcaccgtcaccgacgagcgcaaggagaaggtcgacttcgccaagccgtacatgaaggtggcgttgggcgtcgtttccccggaaaacgccgaaatcaccgacgttgaccagctcaagggcaagaccctgatcgtgaccaagggcaccaccgccgaaaccttcttcgagaaaaactaccccgacatcaagctgcagaagtacgaccagtacgccgatgcctacaacgcgctgctcgacggccgtggcgacgccttctccaccgacaacaccgaggtgctcgcatgggccaagtccaacaagggcttcaaggtcggtattaccgaactgggcgataaggacaccatcgctgccgcagtgcagaagggcaataaggaattgcttgactggatcaacgacgaaatcgacaagcttggcgatgaaaacttcttccacaaggattatgaggagacactgaagccggtgtatggcgacgaagtcgatcctgatgaaatcgtggtcgaaaaaggtgtggtcgactgataactagttaatcaaactaaatattttgaaccttccgtcgcttcaggcggaaggtttttctatattcacataatcatatttacatacaaatatatgattgctgataacgctatataaaaaacaattattacgattcgcgccttccataaaaagcgtatatagccacgccgatgttgccatgttgtttttccgatatcttgtgattgtcggcttgaaaaacaagcgagatgttttacgagagaggagcgcggaacatgaagtacgcagtgatcggtgccggcggaatgggcatccagtacggtgtgctgctgcaggaattcgcgcacaaagacgtcgacttcgtcgatacatggaagccgaacgtcgagaagatccgcgagcagggcggtgcctacgtgtcgcaagacggtgaagaccgccatctcgtgccgatcaacgtgtactatccggaggaatacgccggccagccggacgtgtggatcgtgttcctcaagcagatgcagcttgacggcgtgctcaagcgctgcgcccatctgttcaatgagaagcagatcgtgttctccgccatgaacggctatggacacttcgaaaagctcaacgaatacttctccacagaccgcatttacggcggtaccgcactgatcggtgcctacgtgtacggccccggcgatttcaacttcaccggcggagtacatgccaaggccatgaacctgtgtgcctacgcggatgatgtgactgacgaggtgcgcaaacacgagcaggcgctgtacgaggatttcgcaacggccacgctcaacccgaccatcgtggacaacttcatcggcatgtgcatggcgaaaatcgtattcaactcggtactgaacacgctgtgtaccatgtaccagattcgtttcggcgaattccatgcgcatcccgacgcacgctggctcaccgaacagctggtcgatgaagcctacagtgcggccgaagcagccggataccaactgttgggcacgcgcgaaacggaagtcgaaaccattctgcacaccgcgggcgtggcacatccgctgcactatccgtccatgtatcaagacctgaccaagggacgtccaacggaagtcgactacatcaacggctatatcgccaaagtcggacgcgagcatggctacgaatgcaagctgcacgaattcctaacccgcgaagtgcatctcgccgaacaagccttcgccatccacaatccagacatcgtcgcacaggccaaagccgacgtcgaagccagtaagccggtaacggaataatcgtattttttcaaaacaagtaggagaggggaaacaaccatgaccatcgctattttcaagaagccgaacggcatcaaacgaatcgttgcagcagtacttgccgctgcaacacttatttccgttgcggcatgcggttccggcaacggcgcatccgcatccaaggaaagcctgaacaccacgaagggcaaaaccaccacaatcaccgtcggcgtgtgcgcaggaccatacggcgacatggtcgacaaggtcatcgcgccactgctgaaagatgacggtttcaaactgaaaaccaagctgttcaacgattatgtgcagcccaatcaggcacttgcatctggttccattcaggcgaatcttttccagcatggcaattatctgaagaagttcaccgccgacaacaatctcgacctgaccgcccttggacagaccccaacccttggcctgggcatctattccaacaagtacaagtccatcgatgacatcgaagacggagctacggtcgcaatcgcgaacgatggctctaacctggcacgttctctcggcgtgctccagcagcagggtctggtgacgctcaagggcgaagtcgatgccaccaaggccacggtcaacgatatcgcatccaatccgaagaacctcaaaatcaaaacgatcgatgctgcacagctggcccgttccttggacaccgttgatgtggctctggtgccgggcaactactcttgggctgctgatctgaagcctgccgacgcgctcgccatggaaaagcaggatgatggcgtgatcgaagtgttcgtggtccgtacccaggacgtcgattccgacttcggcaaggccgtcaagaaactgctcgtcagtcagaaattcaaggacgccatcgccaagagcgagttcaaggatttcggcaagccgaccacttggtgaccgctgcagcgcggcgataggtaatatgcaaagacccgtatgaattgggaaactcatacgggctttatgcaaacgagattcatcaaacgaaacgtatcgaacgaaacgtatcgaacgaacgtaaacacgtacttgaacggaatgaggaacgaaccatgagcgttattgaactcaacgacgtgtccgtgacctttcatgaaggcggacgaaccgtcgaagcggtcaaacatgtgaacatcagcgtggaaaaaggcgaaatcttcggcatcgtgggcttctccggagcaggcaaatccacgttggtgcgcaccatcaacctgctggaacgaccgacgggcggtcatgtggtgatcgacggcagcgacatcaccgcactcaaaggcggtcagctgcgcgacctgcgcaagaaaatcggctttattttccaaggattcaacctgatcaccaatgtcacggtcggcaagaacatcgaattcgcgctgaaagccggcggatatccgaaagcgcaatggtcggcacgcatccgcgaactgctggcactggtcggtttggaaaacaaaatcgacagctacccgtcaagcctgtcgggcgggcaaaaacagcgtgtatccatcgcacgtgcgctcgccaacaagccggaaatcctgctgtgcgatgaagctaccagcgcacttgacctggaaaccacggaaggcattctggcgcttctgcaacgcatcaaccgcgaactgggcattaccatcgtgttcatcacgcatcagcttgacgtggcaaagcagattttcgaccgagtggccgttatggaaaacggtgtggtagtggagcaaggcaacaccttcgacgtgttcagcacgccgaagcatccgaccgccaaagcgttggtggaacgctatctgggcattgcggtgccgccgcagctggtgccgtcgctgccggccggcaccatcgtggaactgcgatacaagggggatgcggcactcgaaccgctcatcagccgggtcgcgcaggattacggcgtgagcatcgacgtgctgcatgcgaatgtggaatatttcggttcgcaggccatcggcattctgattgtgctcgtttctggcgcgggggagccgctggtgcaggcgttgaatacgttgagaacgcatgtgttcagctatcgggaacttgatcgtgggcagctggttgtggccgccgaagctgcggataatcaggaggcgtgagaacaatggaagaaactctggaaatccttcaagacaatctcggtcaggcgttgatcgacacggcatacatggttgtggtgtcggcgattatcggcgtggtgttgggcacgttggtggcgttgctgctgtatttgaccgaaaatcgtttgttcacgccgaatcatgcgttgaacgttattgtcggtttcatcgtcaacgcgattcgttcgctgccgttcctgattctcatggtggtgcttattccggttgcgcaattgattctgggtgatccttacacgccgacaggtggcgcaatttccctgtcgatcgccgcggtgccgttctttgcgcgaatcgcggaaagcgcgttttccgaagttgatccgggcttgcttgaagctgccatctccactggtgccaccacacgccaaatcattgtggatgcggtattccctcaggccttgccgtcgttcattcgtggtgtggtgctcaccattatttcactgattggctattccgcaatggtcggaacgatcggcgctggcggcatcggcgatatggccattcaatacggctataaccgttacgaaaccggcgtgctcgtcgtgattgttattattctgatcgtcattgtgcagatcattcaatggatcggcgattggttcgcacgcaaggtgacgcactgatggttgcgtatatgcgtgaatgtgcgcatatacagtcgcacgatgatagggagggttgatgaatgacttcgtatgtttctcctgttgcgttcactacggtggcgcagtcgattccgccgaatgtgttcgccgatatggatcgcaaagtggctgccgcggttgcggacggggccgatgtgatcgatttggccaaaggcaatccggatgcgttccccgctgacttcattcgagaagtggccaaaaaggcggttgacgatccggccaatgcccggtattcgccgttcgacggcaaaccgagttttctgcaggctgccgaacagtggtatcgcaacacgtatggtgttgaggttgattggaaaacccagctttttgccgtggagggcgcggttgatggtctcgcggcgctgttcgccgtgcttgtttcgccgggcgatgctgtggcatatgcggatccgtattacccctcgtatcattgcatgacggtgatgagccgtgccgaggaggttctgctgccgtcgctgccggaacgtggcttcctgcctgatttggatgcggtgcctgcgcaagtgtggaatcgtgtgaaagtgctggtgctcaactatccgaacaatccgacgggtgcgcaggctccgcgtgggtttctgcaacgtgccatcgatttggctcatgaatatcatttcgcgatcgtgcaggatttcgcttatgcgggattgggagtcgatgcgcagcaaatcagcatactgtcgctgccgggtgccttcgatgttgcggtggaagtatgctcgctgtcgaaaatgtatgcgatggccggctggcgtgccggtttcatcgcgggcaacgacgacattgtgtctcatgtgaagcagtaccactatcaaatgggttccatggttacgtccagcattcaagacgcgggcactgtggcactgctgtcggatcagagctgtgtggccgaacttgcggaacggtatgcgtctcgtcgcgaaatcgtggcaggtggattgcgtgaagtcggacttgatgttttcgattcagacggtggcatctacgcttgggtgcatgctcctgaagatcagacgggtgaacagtttgccgacatgctgttggaacgtgcggccgtcgccgcgctgccgggcatgtgttttggcaaagtgggcaaggattacgtacgattcagcctgcttaaatccgaggaccagttgcgtgaggctgtgcgccgggtggctgctgtgctagcgtaatttttcctacgtagcctttttgcatggatgagcgattgtgtgcttgcacaatcgctttttctattttcctccgattgtttgcgatcgtctttcgatcggttgtggacgtcccatcctccaattgccatcgaaacgtctttcccttaggaaaccgacacacgctccttatgcaggcgacgtttttgcgattgcggtgcggtgtcttgcatctccgccgtttgatagctgcttacaggaaaatgttatggcgattcgcgcgttctatagccaacgttgataaggtgcggcgcgcgttgaaatgcaggatgcggtttagtgggtaccagcgaccgcgtgaatggcacgcggcaatgaaccacaacccaagggggtgcacatcatgaccagattcaacactcagtttgtccacggactgccggtcaacgataacaacaccggagccgtgaacccgccgactacgaagcgcttgatgccgctgtttccgggcactccgccaagggacccgcgcatggttgtccggcgaaggccgtgtatttcgaagttcttaccaatccgttgctgcaggtcaacaatgtgacgaagattgctgaaatcgctcatcgctatggtgcgatttccattgtcgacaacacattcgttaccccgtatctgcagctgccgctcgaccaaggtgccgacatcgtcatccattccgctaccaagtatctggccggccattccgaagtcaacgccggtcttgtggtggtcaaggacgacgggttgggcaaacgtgtctacttcgcgcagaatcgtttgggtggcgtgcttgcgccgaacgaatgcgattcggtgcgtcgtggtattcagacgctcgccctgcgcatggaccgccagcaggagaacgcgcgtgcgatctccagctatctgttgctgcatccgctggtaaaatccgtgcattatccgggattgtcggggcatgagtatgagatttggacattgttcaggaagttgcggatgaggtgacggtaatgaaagacggccatcttgtcgaatatggagctgtcggttccgtgttacgacaccctaaagatgcgtatacgaagatgttgcttgaggcatcgcctaaatttgatgagattaatgcctcgtaaggagtgattttatgattgacaatgcggcaattgatttctatggagccgactggtgcggcgactgccatcgagccaaggcagcactagaccgtttcggggtcgcctacagccttcatgatatcgagcatgaggatggtgctgcagagaaggccattgcgatcagcggacaacagcacattcccgtgattcggttcgccgatggctcatggctggtggagccttcggccacgcagttgcaagccaaatgcaaggaactcggcctgatctgattcaacattgcgtatgccatctcacgagtcggacaaggagaattgtctcctgttcggctcgtagacgtatgtgggtcggcttccggacggtcgatgtccggcttccgaatggactttgcccaactcgcggacattgtctgcacgtgattgcattctttggtaagtttttgcttgggttcggcaatggttgcagaacctacggaaagccgtcaatcaacaggctttcgagagaaaaccaaagaagggagtaatgtcatgccgttccttattacgctccttgtcattgcacttatcgtcgcgttcctgttcctgtccacgttgtttatcgtgccgcagcagcaggcctatattattgagcgtttcggcaaattcaacaaggtgcagttcgccggcattcatattcgaatcccgttcgtggaccgtatcgccatgaaaaccaacatgcgcgtcaatcagcttaatgtgcagttggagaccaagacgcttgacaatgtgttcgtcacggtggtggcgtccactcagttccgtgttgacccgagcaatgtggccaccgcatactatgagctgcgtgatccggctggtcagctgcgttcctacatggaggatgcgctgcgttccgccattcctgcattgtctttggacgatgccttctcccgtaaggacgatgtggcttttgacgtacagaagaccgtcggcaacgaaatgtcccgcttcggtttcactgtggtcaagacgctgatcactgccatcgatccgagtccgcaggtcaagaacgccatggattccatcaacgctgcccagcgcgagaaggaggccacccgtcagcgcgccgaagcccagcgtattcagatcgagacccaggcggcagccgaggctgagaagacccgtcttcagggtgaaggccaggccaactatcgtcgtgagatcgccaatggtatcgtcgaccagatcaagagtctgcaggcagtcggcatgaacgtgaacgacgtgaacaatgtggtgttgttcaaccagtatctcgacaccatgcgtaatctcgcctcgtcgcagaatgcgaagacggtggtgttgccggcttcgacgcctggcggtttcaacgagatgcgcgaccagatcacccaggccatgatgtccgcggacgaagctgcgaaatagtcgcaaaatagccgtgccgatgctctgcatcgatgacaagatgaccttcgtattcgtgttgtgcgaattcttgcgccaaagtgctttttccaacacgtcgtgctccctcaataagcatggcgcgcttgccattcgacaggcttttccaagccatgagtgtttgatatgccttgcgcctgaagagcatggtgtactccttgaaaattaaggcatttacacgaaatgcagagtaaggacagcgcgttttatacacgaaatgcagagtgtcgatacggggcgaggatgtttcgctgacgttccagaggcatgaagaatccctcctttcgagacggccgcttatatgtgacggagagcgcggcggtgaaaggagggattattgtttggcgcgttgccgtaccgcaacgcacgtctatgtgattggcctgtcggcaatgaccgtgttttgcgcacgcatgtcatacgtttcggcgtatgtcacgccatgctgacaagaccttccttggagtttgaattcggcagtgagcagttcatcgcatgtgattcaagcaggtgaagctgtttctgcaggtccatgactttcttttccagccatttgatggtcatggcttgggtgatcaccagcagatcgcgctgcccggaatcggatttgtttgccaacgtctgtgcttcaagcatgattttcggatcggctttccaacgggcgatcgcgcgttcgatgcgcttgcctcccatgattttcggatcaagacctgcgctggcgaaaatactggtaggaccgttgccgcgcagatattgcgccatgcaacgcacctgaaattccttcgagtacgtgatgcggtccatggaagctcgctccaccgcgggcagggtgttcaggtaatacacctcggtttgagtaaaacgacgacgcatgatggttccccttgtgtggtatgcggatgacgcttccgacaacgtcatccgaatgtctgcctcgttgttttcattctatttttgcgagattcggggattttgccgtctggcacgaaacgaagtgtttttggcacgaaacgagaaaaccaccccagttagggttgttttaggaggatgtgagacgggggtctgtgcttctcggggtattcccctaagggatgcagggaactggaaaacggtataaactcggttgtgggacagacgtattgacgccgtgtgggggagggcaatgaagactatgacagatcatgaagggcaagagtcgatggcggggacgcgcagacccatcatcgaagtcaagaatctgcgtaaggaatatccggtgctcgatgaaaccgtcgtggcgctggaacgcatcaatctcaccattccgcaagggcagatctgctgtatctacggcgaatccggttctggcaaatccactctgctgaaccagctagcaggcatggaaaaaccgaccaaaggcggcgtgcgcatcgggggagtgcccatttctcggttgaatgaacggcaattggcggaatttcggcaaaaacatcttggtttcgtattccagtcatacaacctgcttcccaatctgactgccgtggaaaacgtggcaatgccgctgatgttccaaggcatgccgaaaaacaagcgtgaggcaatcgccaagaaaatgctgaaacgagtagggctcggcaaacgcatgaaccactacccgacgcaaatgtcgggcggacagcaacagcgtgtcggcatcgcgcgagcgttcgcagccagaccgcaagtcgtattcgccgacgaaccgaccggcaacctcgactccaaaaccaaaaccgacgtgatgaacatgatctgcgcgttcgctcgcgacctcgaccaaaccatcgtgctcgtcacccacgatgacaatatggcgcaatatgccgaccgtatcgtaacgctacttgacggacgcatcatcgatgaccgtctgatgaacaacgcgtgacggcagagaagagaaggaaattccatgagtaacagcaaccattccgcaaaattcatcaacatgctcatcgcattgatggcgtccatcgccatcgcgctgacctgcattgtgccgacggcgctcgccgaagacggtgatggcactgacggcaacaacggcggctccaccgtgcagccgtccggtccggtgccgaacatcatcatcaccaacttcacctatggcgacggttccgtggcggtcggcacgaatttcgatcttggcttcaccttccagaatatgggcaaggtcgcggtcagcaatatggtcgtgaccgttgacggcggcgagaatttcgccatttccggcggtacgaacacgttctactacgattcgctgtgggcgggctattccctgacccagaccgtgcccatgcaggtgctgtcgagtgcgaagaacggcgcgcagggcatcgatatcaacttcaaatacgagtatgtcgatggcgacacccgcaattccaacacttcggatatcaagatttccgtacctgtttcgcagcccgaccgtttcgaactgggcgatcccgtgcttccagacgccatcaatgcgggcgaggaatccaccatttccatggaatacgtgaacaagggcaagggggatgtatccaatgtcgaagcgtccatcgagggtgacggcatcaccgccacgcaagccacgcagtatatcggcaatgtggcgtccggcgcttctggttccatcggattcgctttcactgcggatgcggccggcgaatatgatgccaagctgaaggtgacgtacgaggatgccgacggtcagcagcagaccaaggaatcgccggtgaagattacggtgtctgaggctccggcccccgtcgatcccggtacggatgttgacccgcaggaaaaccagggcattccgacttgggtgtggattgtcgttgccgtggctgtcgttgccatgatcgccattgtggttgtggtggttgtgcgtcgccgcaagaaggcgaagaaggcggccgaggatgacgattgggattgggatcccaccgattcgcatgccggcactgaagctgatggcactgccgatacgactgataccacagctggcaccacggcaggcgctattgacgcgccgacccaggtgattgattccgtgccctccgccaaggagtgagcatgcgattttcggatattgcacgttcatgcacgcagaatctgctgcgtcgcaaatcgcgtacgattcttacggtacttggcgtgatcgtcggctgctgttcgatcgtgctcatgatttccattggccagggcatcaatgagcagaacgagcagatgctcaaaaacatgggcaacctgaacgacatcaccgtatatgcggacggcggaggttcgtattccacggcaacgtcatccagcgtgagcggtgccgacggcgaacaggcgaaactcgacgatgacgccgtgcagaatttccgcagcattgccggtgtggccggagtgcttcctcagaaaacgatgtcatacagtgtggatgccacgcaaggagctggctcccggtacgtgtcgcaatatgtcaacgtggtgggagtcgacgccacgcaattggaagaatccggctataaattggccggcggacgtcttccgatgcgtgccggcgaagtgttggcgggcaaatccttcgtgtattcgttctacgacaagtatgcgtcagattcaagcaatcatcgtatagaagcgggcggttattactgtgatgagcacggttgcgcccaatccgaaggcgaagacccgttcttcgatatgctgaactccaaaatcacactgattaccggagccaactatcaaagtcccgacgactaccgcaaggtgggcggcggatccgtggcgtcatccgattccggcagtggtgagagtcccaccattaccatgccatacactgtggtgggtgtcattgattcctccgccaacaactatgatgcgttcacttccggcattgtgatgagcatcgacgatatgaaaacgttgaacgccaaaatatcgggggacaccaaggccaacacgtcgagcaaggtcgtttatgatcaggtactggtgcacacccaagacatcaaagacgttgccgacgttgaagcgcaaatcaaaggcgcaggttatcagacttcctcctttgaacaaacgcgtaaggagatcgaaaagcagtcgcaaggcatccagttggctttgggtggcattggtgcggtgtcgttcttcgttgccgcgattggtattgccaacaccatgattatgtcggtgtcggaacgtacgcgcgaaatcggcattatgaaggctcttggctgctatgtgcgcgatattcgcatgatgttcctgtgcgaggctggtgcgatcggccttgtcggcggtgtgatcgcttgcttgatttccgcgattggttcgataggcatcaatatggcgtctttgggtggattcagcattgagaatatcggcaaagcgattatgggcggcgacgatgtgactcgcatttcggtgattccgtggtggctttttgtagtggccctgctgttttcgatcgccgttggtgtggtagcaggtttcggcccggccaataaggctgtgaagattcccgctttggatgccatcaagaatgatcagtgattgctgattacagatcgctgatttatagattggcggggaatggtccacagatataccgatcattcccgccaattcgcttatgtatcgattattcgctgagaataccgcggattcgagagacgatggtttctgaagtcaatccgtaacgttcgttaagctcgccaagaggcactcggtcggtgaactctttggctgcgccgaaattcagcacacgaacgtgaggagccttggtattactggaattggcataaaatgcggtgactttctcaccccatccgccttctagctggccatcttccaacgtaacaaccaaacgatgcccatcggcaagcatcgccagtaattcggcatccatcgtggaatattgcaatgcgtcaacaagcgtcgcggtaatcgcagcatgttcttcatcattttcggccagtgccgacgtaatttcggcagccaacggcatggtattgccgagtccaagaatcgccacatccctgccgggctgaacgatctgatagcggacgaacgggcatgctccggcaatattgacggctggatcatgctcttcggcacgctgcaacgggtcgaacgccatatcggcggcacgttcaagtgcgagaatctgctcgccgggcatacgaatcgccaccacgccatgttcggacgggccggtagcccaagccaacatgtcaagcatctgttcgccgctcgcgggagccaaacaggtcacgtcgggaacattggcgaacatcgtcatatcgaatgtgcccgaatgcgtattgtccgcgccggaaattcccgcgccgaaaatcagcagcgtggcgggaacatgattcaatgccaactcttgctgcagctggtcgaacgtgcgctggaagaacgtggcggaagtcgcaagcaccgggcggccgccagccctggcgatacccgcggcgaacgcggcggcatgttcttccgtgataccggtatcgacgtagtgggcgccggcacgttcacgaaaatctcgggtgatgccattcgatccgggggttgcgggggagatgaccaccaatcccggctcattgtcgaaacgacgttccagcgatgccatggccatttcgccataatatttgcgtgcgtcgagcggtttgccgagcgaggcctccgggtcctgccaatggttggcctcgcattggcccgcatgaggttgaggattggtctgattgcagccatccgaaccattgtcggcttccgtttcgtcattgaagcccaagcctttggtggtgtggatatgcactacgatcgggtggtcaatgtctttgacctcgttcagtacttccaccagcgcgtcaacgtcattaccctgctccacatagcggtagtccaagccgaatgctttgaacagattcagttcggccatgccattcgacgtacgcaacttggcaagctgcccgtacataccgccgaaatcctcagcgatcgacatttcgttgtcgttgacgatgatgatgagattaccgccctgttcggccgcattgttcagcccctcgaacgcaatggccgaactcagggatccatcgccgataatggcgataacattgccgatagtgctttcgccagcggcgccgcgctgcatatcgcgggttttggcaagaccgcaggccagagaaatcgaagtgccggtatggccgagcacaaaggaatcatgttcgctttccagcggattcgtgaaaccggtcacctcatcaaaatgagattggtccaagtatgcttcggcgcggccggtaagcattttgtgcacgtagctttggtgcgacacgtcgaaaatgaaacggtcgcggggcgagtcgaacacgcggtgcaatgccacagtgagctccaccacgccaagattcgagccgatatgcccgccatgttttttgccgtagtcgagcagtgtggcgcggatttcgaggcatagatcgcgtaattgctgggctgaaagggcatgtacgtccgccggagtgtgaatcgaactcaaaatgccagcggtcatcgtgcgcaatcacccttcccttcaatcaatgcaaccaactgcgaaatcctatcccactgtatgccccgacgagggtgtttgcgggcaaaggagcgcaaagtcttctcaacttgaggcacaatagaggtgtttgcaatcgtgaaaagccgttattcgcaaaggagcgcgaacatgaaagccgtatatgccaccggaacgaattatgatgatccgctgtccgtgtttgaagtgggcactatgcctgagcctgaaaccaagccattctggtccaccattcgtgtgaaatcggcgagcgtgaaccatcatgacgtgtggagcctgcaaggtgtggggctttccgacgagcagacgccgatgatcctcggcaccgatgcggctggcgtgctgcaagaagacattcccgtacgaaaggggcttaaggccggctccgaagtggtcttgtataccttcgttggtaccgatggcgccggtgtgatgccgggggagagacgctcgatcctgtccgaacgatatgcgggaaccatggccgaatacacgcaggtgcccagcgccaacgtgttcgccaagcccgcgaatctgaatcttgatgaggctgccgcattgggtaccagctggcttaccgcatattccctgctgttcgcatcggcgaatgtgaagccgggagacacggtgcttattcaaggcgccggaggcggcgtgtcgaccgcggcgattcagcttgctcacgcggccggattggaagtgttcgtcacgtcacgaagcgaagacaagcgtgcgcgagtgttgcagctcggtgccgatgcggcttttgaaacgggtgcgcgactgccacgcaaggcggatgccgtcattgaatccgtcggcgcggccacatggagtcattccgtcaaatccgtacgtccgggaggaactatcgccatttgcggcgcgactactggcgaccagccgggtgcagagcttacgagaatcttcttccaggatattcgagtgcagggcaataccatgggctcccgtgaggatttcgcacgtttgctgaaattcgtggaacatgccgatctgcatccggtcatcgattccgcatatgcgatcgacgacgcgcatcttgcgttctccaagatcgtgaatggcgacgttttcggaaaaatcgtgctgcacatctagccgattgcgtaaagtaaacggtgttcaagaacatgttcttttggattctttcggaggtccttgatggcagacaacaagcctgaagtcgcagtgattatggggtcggcgagcgattgggaaaccatgaagcatgcctgcgagatgcttgaccagttcgaagtgccgtacatgaagcaggtgatttccgcgcaccgcaccccggaattgatgggcgagttcgcgcatagtgcccgtgccaacggtctgaaggtcatcatcgccggagccggcggcgcggcacatctgccgggcatggtcgcggcccagaccaccctgccggtcatcggcgtgccggtgcgttcccatgcgctgtccggttgggattcgctgctgtccatcgtgcagatgccaggcggcatcccggtcgccaccaccgcagtcggcaactccggtgccacaaacgcaggtcttttggctgtgagcattctgagcaccaccgatgagcgtttggccaatgctttgcaggaatatcgtgactctctgaaggaaaaggtggctgaatccaatgcccagcttgtctgaggaaaccaatggccgtgttgaacgtctgatgccaggggccaccatcggcattatcggtggcggtcagcttggccgcatgatggcgttgtccgcccgctacatgggcttccgcatcggcgtgctcgacccgactccggattgcccgaccgcacaggtggccgacttccaagtcactgccgaatacgacgacatcaccgcgatccgagaactggctgaaaagtccgacgtgctcacgtacgagttcgaaaacgtgaacgccgacgccatcgacgaagtgcgttccttgtctgcagccccgcaaggcaccgatttgctgcgtgtcacgcaggatcgtgtcaacgagaagcagttcatcaacgatcatggcacgccgaccgcaccatggaaggccgtcaacagcgttgaggagcttgatgcggcgctcgatgaaatccattacccggccgtgctgaaaacccgttccggcgggtacgacggccacggccagaccgtgctgaaatccgatgccgatctcgaaaaggtacgcgcccgtgccgatcgcggtggcggattcccgccgagcattctcgaaggattcgtcgatttcgcattcgaagcgagcattctcgttgccggtaacggcaaggattatgtgaccttcccgatcgtgcgcaacgagcatcgtaacaatattctgcacatgaccatcgctccggccgaagtcagcgaagacgtggcgaaggaagcgcacgaactcgctttgcgtttggcgcaaggcttcgaactggccggcatcctcgctatcgaactcttcgttaccaaagatgagcaggttatcgtcaacgagcttgccccgcgcccgcataactccggtcattacaccatcgaagcgtgctcgttcgaccagttcgacgcgcatattcgaggcattgccgggtggccgctcgaacagcccgaactgctcaagccggctgttatggtcaatgtgctcgggcagcatgtggcaccaacccgcgcgctgatcgccgagcatcccgaatggaatatgcacgactattgcaaggctgaagtgcgtcatgatcgcaagatggggcatatcaccgtgctgaccgacgacaccaggcaaactgtggcggatcttgaacagaccggctgctgggatgatttgaaataaaaccgatgacggcatgtttcgcgcgtcagcctttccccgaggggagggcggcgcgcgaagccatcaagaacggacatagattgacggacggacgcgtggagcgcaacaccaaacaaaaagaactgattcatgatgcgttgaaggcaaacgatgaattcatttccgcacaggatttgtatcgcaagctggaagacgaaggcgtgaaggtcggccttgccactgtatatcgtcaattgaatgccttggctgaggcaggcgaggctgataccgtgcgtttggaaggccaacagctgttccgtctgtgtggtgatgacgggcatcaccatcatctcgtatgcacgaattgcggcaaaaccgtggaaatcgaatcgccatccgaaacttggctgcgtggcatcagcgagaaatatggattcaccatcgaacggcatacgcttgaggtgttcggactatgctccgactgccggaatgaggcacgacggtaattccgtcgatctcaacaatttcgccgatttcagcaacaacggttatgtggacggcggaatccttgacgaaaactagatactgccatccgaactgtctatactccctcatcgttcttttgcgatttcatcgacatatgcgtaagaaaatcagaagaaactgtggatgaaatcgatcattacagctttttgtcagatatggtcgcgaaaatagtgccttggtgtcgccgtaaggcgggaaacgaagcgaactgacacgttacgagtggagataaacacttgacgaacgaatccgtgaatacagagacgattgaggaactgaagatctcgacgattgatccaaacgcacccgccaaggaacgtaaggaattcccagggtggttgtacggcatactgtttgtggtgttcgacgccatcggtgtggcagcgctgcagattggcgtcagtcaatccactacacgcgtcaagctttcgaacaacatgtggctgaccggttggggcttcgtcaccaaaatgttcaccaacctcaactttgtggcggtgctcaacctgattttgtggggcgtgctgtatgtgatactgctcatgctcatcaaccgcttctggatcgccacgccaatatttctggcggtgacattcattatcgcggtgatcgagcatttcaaagtatccatccgatatgaggcgattcttcccagcgatctgaacttcctcaaagccgatgcgggcaatcttatgagcttcatgccggcaggcgcacagtggaccattctgctcgccgtcgtcatattcgttgctttcattgcgcttttcgtattcctgaatcatcgtgacggccgtcacggcaagcttttccgtggcgacgacaagcagtcgcgctcgctgaatgccatcgtgcgactactgctgatcatcgtgccgggaacgttcttcacgctgtattccatgcaggtgagcactgtcggatcttgggcgaaaaccttctcttcggcaatgggggacatgccgtccatgtgggattccgtctacgatgcgcagcgcaacggaccgctggtcgccttcaccaggcagctgaatccgaaagtcatggtgaagcctgacgactattccgaagaaaccatgaaggaagtcgcggcacgatacgaaaaagaagcgaagaagatcaacgcatctcgtaccgagaacatgaccgacagtacggtgatctatgtgctgtccgaatccttctccgacccgtctcgcgtgccggggcttaaggtcaacaaggattccatgcccaacattcgttccatcaaagagaatacgacctccggtttgatgctttcttccggatatggcggtggtaccgcaaacctcgaatacatgggattgacgggtttgagcatgtcgaatttcgattcgtcgctcaccagcccgtatcagcagcttgtgccgagcgagcattggacgccgaccatcaaccagctgtggggggcgtcgaagaattccatcggactgcacccgtacgaatcgtctatgtactcgcgtgcgaccaactataagaagttcggattctcgcatttctacacgttgaccggtccggacgtcatctcgcatcaagacaagatcgacgattcgccgtacgtgtctgacgaagcgacgtacgagagcaccatcgaagaagtcaagaaaaccgatggcaaccagttcctgcaggtcatcaccatgcagaaccacatgccataccacgattggtataagaacaacgatttcaaggccgaatccactacggacactcctttggaggacgatgagaaggagtccatcgaaacctatcagaagggtgcggctctgaccgacgaggcgaccgccgacttccttgacaagctcgacgccatcgacaagccgatcaccgtggtgttctacggcgatcatctgccgggcatttattcgtccgcttccgaagacgacaacaattcgcttgccttgcatctgacggattatttcatctggtccaacaaggcgtccagctcgcaaggcaacgagatcgacaacgccgactattcgtcgccgaacttcttcgtggcgcaggccgccgagcatatgaacgccaaggtgtccccgtatctggcgttcctcacgcaaatgcatgagaaaatctccgccatggagccgcctgtcgtcaacaatatccagggatgggaccgtatccctgaaggtcagaacatctatctcgacgctgacggcaatcccatggccgaaagcgacttcgacgcggaaactcggcagttgcttgccgactaccagctgattcagtacgatatcaccacagggaagaactacctgaaagacaccgatttcatggatcttccttagaggcaagggggaagagatggccgcaaccgatcgcgaacagcagattttggcgtggattaagcagaatcctttgatcagccaaaacgagcttgcggaactgtgcggcatcacccgttcaggggtggccgcgcacatctccaacctgatgaaaaaagggtacatccaaggcaaagggtatatcgtcactccgcccagctatgtggctgttgttggcgccatcaatatagaccattacggtgtcgccatgcaggatgtggttggggaaagttccaacatggggcgcattgtgtcatccgtgggcggcattggttacaatatcgcctacaatctgaaccggcttggcgtgccgaattatttgatttccgtctatggtgatgatgagaacggcgaacgcgtcaagcaggacgcgtatgccaacggcattgacatcacgcatgccaagcagatttcccatatgcctacttccaccttcttgtcggttgtttccgcgcaggggcgtcagattgtgggtcttgatgatatgcagatcagtgcggaaatcaccccggaatttctagctcaacgagagcagaccatcgtcaatgcggaaatggtggcgattgattcgagcttgccgtctgatgccatagcatgggtttgcgaaaaaacaagtcgaccgattttcgtgtgcgtggtttccgttaataaagcggcgcgaatcacgccggtgctcgatcgcatcgacactatggtgcttaattccaccgaagccaaattcgtgtcggggattgaggtgcatgacgaggccagtgccagagattgcgccgaacatttgctgcggtccggtgtacgtaatgtgtttctttttgtggacgattcggacatgctgtactgctgcgaacatgaaagctttttctggtctttgccgggaagggcggaggaacgtcgatataccaatggtggtgcgtcggcggcgttgagtgcgctggtgtgggcgcgtcgtgagcataaaacacagcaggaatgcgctagatatgcgtctgcggcggctgcgatgaatatgtctcaggtgcagtcgatttgcgctgatttttctgaagaagctgtgcggcgcaaagctgatttgctgcagtaacgcaggtatggcggtcttatatttgtttctttcgtaatcgcgagacacgcgatttttccatatgttacatcgatgaaaaataagcaaaagttgactggcttaaacttttgttgtactctaaattgaagataaaacgtttcatcaagggtgtatcaaggcagatatatccccgaaaatgtaggaggcaatatccatggcggatatgacttcaggaaatactgttcctgaccgttacgttgtggtcatcggtggcatgaacatggacatctgtggtagaccgacgagcaccgtagtggaccgagactcgaatccgggcgtcgtcagcatgtccgcaggtggtgtcgggcagaacatcgcacagaacatggctcatctgggcatgccgacatacctgatcaccgtctacggcgacgatgaaaacggcaagaccctggaacgttcgtgcgcggccaacaacatcaatcttgactatgccgcacagctggaaggacgccgttcttccacctacatgttcatcaccgacgatacgggcgatctgctggtggccgtcaacgacatggaaatctgcaaggaaatcaatccggcattcctcgaatctcgcctcgacttcatcaacggtgccgccatctgcctgcttgacgccaatcttgaaccggaaaccatggcatggattggcgaacacgtcaccgcgccactgttcggagataccgtttccacagtcaaagcgcaccgtttcgacacgatcctcaacaagatgaccgtgctcaagccgaatgatttggaagcatccgtactcaccggcatcggtatcgccgaccagtattcggcaggtgccgcagcgaagaccttgctcgacaggggcgtgaagaacgtattcatttcattgggtgccaacggaatcctgtgcgcgagacacgaaaacgacgaatacagcttcaagcatgtgccgccataccgtaccgaaatcgccacggcaaatggggccggagatgccggcatggcagccatcacctggagcttcttcgataaccccgatcgagatcttgaagaagtcggcaaaattgcgcaggcagcatccagcatcgcgctcgaatgcacaaaagcagtgcccgatatcaccgtggaacgcatacgtaagaagatgtccggcgagatcgagccgttgctcgacgaagtgcgtactgcctgaattttgctacatcacacgtccatcaacccatacaaacacaaggagaaccgacaatggtagtcaagcagatctattctctgatcgaatacgatgaggccgtcaaaaccatggaggctggtgccgacaacattggactggtgccgatgcagaatggtggcgttccggcacatcgcgtgccaatcgaacgcgtgcaccgcattttcgacgaatgcaagcgtcgtggcgtcacctccgtggccatcatgctgaccaacgatcccgacgagatgatcgagcttgccagagaggtgcggcctgacattctgcatatcgcaggcgatgggtacgccgcagatgaagcattcgcggcccgacttaaggaagccgctccgaacaccaaactcatgcaggccgtgctcgttgacgatgaatccgccgtcgaccgtgccaagaagtacgcacaatactgcgatctcatcctcacggactccggtctggcccccgacaccggcattggtgccagcggtctgacccacgactggagcattgacgcccgtattgtggccgaatgcggcaaaccggtcatcatggctggcggtcttggaccagacaatgttgccgaagccatcgaacagtgcaagccgtatggcgtggactccctgacgaagaccagcatcaaatacgacggcggctacatggagaaagacatcgacaaggttcgtcaattctgcatcaatgccgacgctgcggccgcaaagatcggacagtgaccgatggctatggaagtcaaactgctgcaacccgtcaaagtggtctgcactgacgatttaggggagactctggtcgatatcatgcagaccgcgggctattctcgtccgctgatggtcacggattccttcgtcggaagcatgccgctggtcgttgccgcacgtaccaagcttgaacaggtcggtgtcgatgtggcggtattcgaccaggtcaagcccgacccgctttgcgaaaccgtggaatccggcgtcgaagcattcgaagcgcataaggctgacagcatcatcgccatcggcggtggcagttccatggatgttgcccgaggcatcaacatcgtgcgtgtcaacggcggatccatcatcgaatacaccgatccagccaagccgatcgcaccatgcaacggtatgatcgcagttccgaccaccgccggcaccggcagcgaaatgtccaacgcgctggtggtcaccgaaggatccaccggtcgtaaactcgcggtgcttgccgatccggcagtcagcgaatatgccgtgctgaacgcggatctcatgctgacactgcccgcaaaaatgactatcgcttgcggacttgacgcattctgccacgccgcggaaggatacctttcccgaatggcaagtccggtcacggatgccatttgcgaaaaagcgatgttcctgctgtacaactatctgccgcgtgctgtggcaaacggtcaggatcgtgaagccagggaacgtgtgatggtcgcgtcgacgcttgcaggatggatgctgaacaatgcgggaaccattgcggggcattccatcgcacacgtgctcggagcgaaataccacatcgtgcacggtgaagccgttggctacgcgttgccggcggttatggagttcgttgctcccgtacgtgcgcataaggttcgtgagatcggtcagattctaggtgcggtctacccggaaaatgcgccggacgagcaggttgcgattatcgcaagcagagcgttcaaggatttccgcgaccgcatgctcggtctgcatcctgttgaggattacggcatcagcgttgaagaactcgtttccaatgcgcaggccgtagttgacgagcgttttgcaggaaacacacctcgtgacatcgatcttcaggcagccgaacaactgctcgaaggtttcggaagtcgctgatatcaaaggccattgccggccttgcaacaagttgtgtgaccgatgagccggagtcagtcaatcgtcgaccacctcattatcggttcaaagttggagcacataaggaggaaccataatgtccaagaaaatcatccttgattgcgatccgggacatgatgacgccgtcgccatcctgcttgccgtgggcaatcccaatatcgatctgctgggcgtcaccacggtaggcggcaatcagagccttgacaaggtgacctacaacgcccgtgcagtgctggaaaaggcgcatgccaccgacgtgccggtgcatgccggatgtgaccgtccgctggtgcgcaagcaggaagtggcagcttccattcacggcgaaaccggtcttgacggcgttgaactgcctgaacccagccgtccgctggaagccggacatgccgtcaactggattatcgacaccattatgagcaacgagccaggcaccatcactctggtgccgaccggaccgctgaccaacattgccatggctgcccgcatggagccgcgcattgttgaacgtgtcaaggaagtcgtgcttatgggcggcggataccatgtgggcaactggagtgccgtggccgagttcaacatcaaggtcgatccggaagccgctcacatcgtgttcaatgaagcctggccgatcaccatggtcggattggatctgacgcatcaggcattgtgcacgcccgaagtgcagcagcgtatcgaaggcgttggcactgatctcgccaagttcgtgtctggtctgatggacttcttccgcaagacctatcaagacaatcaagatttcatcgatcctccggtccatgatccgtgcacggtggcatacctcattgatccgagcgtcatgactacccgtcgttgcccggttgatgtcgaaatccatggagatctcacacttggcatgaccgtcgccgacctgcgaggtccagagccgagcgccgaagaatgccacacccaggttgcagtcaagcttgatttcaacaaattctgggatttggtaaccgacgcaatcaagaccatcggctgaaagaagagaaagataagtaaaggggtgctctaatgacagagaccaaaaacagcaaaatgctcgacgaaggcggcaagtccgtcgtcgcattgatggcagcattgatggcagccatcttcgcgttccagctcaacgcgtccatgctttcgcctgcattgacgaccatgcgtgttgaactcaacaccaccgatgcgcagattggcttgacccagacggtgttcttcacctcgtgcgcagtgttctcgctgttcctgccgcgactcggcgatttgatcggtcgcaagaaagtgctgcttggcattcttgtgcttaccgctttgggctgcgtggtttccgcgctcgcggtcaacgtgccgatgctgatgatcggtcgtgtgattcagggtgttgccggtccgattgtgccgatgacgctgatcatgctgcacgccaaggttactgaagataagaagtacgccaagctcatggctattctgacttccgttaatggtggcatcggcggtgtcgacgctattcttggcggctggcttgctggcacgttcggtttccgttccgtgttctgggtcatggttggcgttgcggtgcttgccattgtgcttgtgttcgtgtatgcggaagaatccaccgcttccgagactccgaagatggattgggctggcgtggtttcccttgccgccgcattcttggccgcatatctggccatcaacgagattcagaagctgggctccgccaattgggcgctggtcgctgtcgaaatcgttattgcagccgtgctgttcgtggtgttctggaatgttgagaagcgtcagaaggctccgatggtcaccacgcattacctcaagcagcgtcgtacttggggtctgctgctgaccaccctgcttaccatgaccggcgtgttcgccatcatgaacggtatcgtgcctgctctcgctcaggataccgaagtcggcgccggcatgagcgccagcgtggtatcgttcgccaccctgactccgtatgcgttgatcggtctcgcattcggtccggtcgcaggcgtgctcgcttcgaagttcggctaccgtgcggtgctgcgtactggcttgattgtctctgttgtgggcgtgctgttcggcatcttcgtgtgcaacgttccgagcatctgggcacttgtggtcatgtctttggctttgggtgtttcctacgcaggtactgccaacatcatgctgaacggtctgggcatcgtgctctctccggaagacaatccgggctacctgcctggtctgaactccggtgcattcaacctgggtgccggtctgagttatgcagtgctgtacgctgctcagaacgcgttcaccgcatccggcggtgcgaccagcggctacatcgcagccatggttggcggtgtgattctgctcggcctcgcgttctgcgcatccctgctcattccgaagccgggagagcagaagtaatcaatataagcttgcctgtgttgtgtgattaaaaaacggcggttttgcagtcggactcctctctgtccgaccacaaaaccgccgtcctttttatatatatgattgcgattgtatggttacagacatttctgatggtatgcaatcgctgggtgcattcagatgttcagtgccttggcgccgatgtcgtgacggtagaacatgcccttggtatcgagctggtcgataatcgcatacaccttgtcttgagcggccttgatgtcggctgcggaggtttccaccaacagcacgcggccggaattggcgaccagaccttcttcgctacgagccacgccagcgtaatagacgtgggaatcctcatcgactggaatctcaggaatcgcagcgcccttgatcacatcgacagggtagccgtcggcggcgagcaccacaccaagcgtggcgttgtcattatcccaagtgaactccggagtctcgccattgagcagagcgctgatgccggcgccgagatcagacgtgagcttcggcagcacgacttccgtttccggatcgccgaaacgagcattgaactcgataaccttcggaccatccgcggtggcgatcaagccagcgtacagaatgcccgtgaacggcgtaccctcatcggacatagcctgcacggtcggcttcacaatggtttcgatagcggtgtcaaccacatcctgaccgatctgcggaacgggactgtacgcacccatgccaccggtgttcggacccttatcgccatcataagcgcgcttatgatcctgagaaatcggcatcggccagaaatcggtgccattcacaaaactcatcagcgagaactcctgaccctccaagaagtcctcgataacgaccttcgcgccggcgttgccgaaacgatggtcgacgaaaatatcttcaagagcggcgatggcggtttcctcatccatggcaacggtcacgcccttgccggcggccaagccgtcagccttgatcacaatcggagcgccatgctcacgaacataagtcgtggaacgctccaaatcgctgaacgtttgataccttgcggtcggaatgctgtgacgttccatcagctgcttggcgaaatccttggacccctcgatctgtgcggcggccttgctcggaccgaacgccttgatgccagcctgagcgaaatcgtcaacgatgccctcgataagcggcacttccggaccgacgaacacccagtcatagccgttgttctttacgaaatcaatcagcgcggcatgattggacgggctgatttgcgtgatgcggatgccgtcaagctccatacctggattgcccggagccactgtgacctcgctgacgctgctgccacgcataagcgcatgagcgatggcatgctcgcgtgcgccggaaccaatgaccagaaccttcatgtttcctcctgttatgtcccttttgggaaaatcctatgttcaggaaagtcttcggaaataaaagggggtggccgttatggctcacccccatatatgtatttactgcagttcgacgtcgctattggtcttcttgacgatattgccgagcacataaccggcttcgccattggacttgagcaattccatggtcttatcagcatcttcggcgttgactgccagcaccatgccaatacccatattgaagatgttgaacatttccatatgatcgatttcgccggccttctcgagcacatcgaaaatcggcagcaccggccaagagccgagattgatgtgcgcagccaagccgtccggaatcatacgcggaatgttttcgatgaagccgccgccggtgatatgggcgacgcccttgaccacgccggccttgaatagcggggaaagggccttcacatagatcttcgtcggggtaaggagtacgtcgccgagcttttcgccatcaagttcgtcaagtacggtgtcgaccgtgtagccggccttctcgaacagggccttgcgtaccagagagaagccgttggaatgcacgccggtggacggcaagccaatgagtacatcgccttcagcgatggtggagccgtccacgattgcggacttctcggcaacgccgaccgcgaaaccggccagatcgtactcgtcttcgtcatacatgcccggcatttcagcggtttcgccaccgatcagaccggaaccagcctgtacgcagccgtcggcaacgccagccacaacctgctcgagcagtgctggatcgttcttgccacaggcgatgtaatccaggaagaacaacggttccgcaccttgagcggcaatatcgttaacgcacatggctacacagtcaatgccgatggtgttgtgcttgttggccattttggcaacgaccagcttggtaccgacgccatcggtgccggaaatcagtaccggctccttgtatccgagggaagccagatcgaacaggccgccgaagccgccaataccgccgactacgcccggacggttggtgcgagccacatgggacttgatgcgcttgacgacttcgtaaccggcctcaacgctcacgccggcttcttcatatgcttttggcatatcaaacctttctagggttcagtgttcttcttggggtgaagtggtggtgtattcgttgccttcgtacttgctcttatacagggcgaattcaggcagacgcacgcgatcttctggggtgagggacttcaaaaaatcactttcataatcgtcgagtgcggtcgggtagtcgccattgaagtaggccacgcacaaaccgccatacggggcgtccgcgcctaatccaatggactcgaccaaaccgtcaagcgaaaggaacgccaacgagtcggcgccgatgaaatcgcgaatttcctcaacggacttctttgcggcgatcagttccttggtggtggaaatgtcgatgccgtagaagcacgggtacttcagcggcggcgagctgatacgcatgtgcacttcggcggcgccagcttccttcagcagctgtacgatgcgcttggacgtggtaccgcgcacgatggaatcgtcgataacgatcacgcgcttgcctttgaccacgccgcgcacggcggacagcttcatgcgcacgccctgctcgcgcagttcctgcgtcggctggatgaaggttcgagccacatactggttcttgatcaggcccatctcgtttggcagaccagcttcttccgcatagccggaggccgcggacagcgaggaattcggcacgccaatgaccatatcggcatcgaccggcgattcttgggccagacgcgcacccatacgcttgcgggcggaatgcacgtttacgccgtaaatgtcggaatcggggcgtgcgaagtagatgaattccatcgagcagatggccaactgggtctgattggtgtactgcacgatcttgtagccgtgatcgtcgataaccacgatttcgcccgggcgaatattgcgcaccaattcggcgccgacaacgtcaagcgcgcaggtttcggaagcgagcacataagcgccgtttttcatcttgccgagggaaagcgggcggaaaccgttcggatcaagcgcgccgatcatggcgtcttcggtcatgatcaggtaggcgaaaccgccatgcacggtgttgagcgcttccttgagcttgtccatgaacgtacgctgtgtggagcggcgcaacaggtgcatcaacacttcggtgtcggaattggagtggaagattgcgccttcgtcttccaactgacgcctcagagtcgggcagttcgtcagattgccattgtggcacaaggccatatcgccgtcatggaagcggaagatgaatggctggatgttgtcggtgccgcctgaaccggcagtggcgtaacgcacatggccgatcgccttgtctcccttcaggcgttcgatttcgcgttcgtcgccgaacacttgggtcaacagacccgttccgcgatgaccgatgagatgaccgttatcgttcgagacaatgccggcgccttcctgaccacgatgctgcagcgcgtgcaggccgaagtaggtgagtcgggcggcgtccgggtgaccccaaacgccaaaaataccgcattcctcgtggatgtcttcgagttcagctgacaagccaaagctccttccaaaaccatggagacaaggggttcgctaccgttcaaccctaccaaccggaggctacaattggcggttttcgtggagtccttaggggcacttggcatgtcgggtgtgtcgaacaattgttcgaactctctgatatgctgaatgcaggaaaatacagtgcggtgcatcggcgatgctttgtcggtgctttgcgaggcgaagtgctcgttgacgtttcaagatggagccaaatcatggaaggagtctgaagatggccgaacgtacctatatcgctatcgatctgaaatccttctatgcgtcttcggaatgtgcggaactcggattcgaccctctatccacgcatctggtagtggccgaccaatcgcgcaccgacaaaaccatctgtcttgccgtgtcgccatcgctcaaagcatatggactgccggggcgggcgagactgttcgaagtcaaagcgaagcttaaagaagtcaatgctgcacggcgggcagcggcaccgggcggtgtgctgagaggtgaatcgtatgatgcgaaagcgctcgcagctaatccgaatctggctgccggcgtgtatatagccaagcctcgaatgtcgcattatctcaacatcagtgcgaaaatctacagcatatatttaaggtacgtatccgaagctgacattcatgtctattcgatagatgaagtattcatggatgttaccgggtatttgcgggcttacggcaaaagcgcgcatgatatggcccgtgaaatgatccagcagattcttcgggagacgggcatcaccgcaacggccggtatcggtacgaatatgtatttggcgaaagtggctatggacgtggtcgccaagcatattcccgcggataaggatggcgtgcgtatcgcgcaattggatgagatgtcgtatcgtcggctgttatgggcgcacaggccgttgactgatttctggcgtgtgggacgagggtatgcgaagaagctcgaagcccaaggtctaatgacaatgggcgatatagcccgatgttccataggccgtgccgacgagtattacaacgagggcctgctgtacaagatgttcggtgtgaacgccgagctgcttatcgaccatgcgtggggttgggaaccttgcacgatcgccgacatcaaagcgtataagccagctggtcatagtatgagttcggggcaggtgcttacgggcgcggtcggttttgactcggcgcggctgattgtgagagaaatggcggacgccttgtctttggacttggttgccaaaggtgtgaaggccggccatatggggttgatggtcggttacgataccgccagtcttgatccaaagcggctaggggagtgtggcactccggaattgaaggcgatggctgagcgagccattgccgaatatagcggtcccgtaactcttgataggtatggtcggcgtgtgcccaagccggctacagggtcgattggtctggacgaccatacgtcatccaccacgcgcatatgcgatgcggttgacgaattgttctgcagaatcgtcgatcatcggctgttggtacgtcgattgaatgtggttgcttctgatttgcaaacggtcgaacagctggctgagcggaatgctgcggcgaattacgttcagcccgatctgttttcggatatgcaggaagtctcaaatggaagcgatagcaacgattgcagtgataacgtcgataacaacgtgcggtcttcctacgctgacgatatgcgggttgtcgatgagatttccgaacagcatgtgcagcagacgattcttgacatcaaacgcaagttcggcaaaaacgccgtcattaaagggatggacatgttcgctgatgccacaggtcaacagcgcaaccggcagattggaggtcatgcagcatgagtttgcagcaaaccgaccgttacgatgacatcatcaacttgcctcatcatcgctcgtgcacgcgcccgcacatgagcatgcacaaccgtgccgcgcaattcatgcctttcgccgctctcaccggctacgacgacatcatcaaacaaaccgccacccattccaacgaagcagtggaacgcgccaacacccccgtcaatctcgccgaaggctacctctccgcctaacatgcgtcggagaccaaaaaagaggctgtttggtttgactagggaggaatcccgatcaaaccaaacagcctctgtatgttcgaatctacgtcagaacgcttttatggatgcggtcgcggatcaggcggcgaagtactccacgccggctgcgaacagcggctgatccttctcgccgggcacgttcttgaacgtaccgttgctgtaacgctcggagtggcccatcttgccgaacacgcggccgtccgggctggtgatgccttcgatggccagcagtgaaccgttcgggttcacgctcaggtccatgcccggcacgccggcctcgtccacgtactgcgtggcgatctggccattggccttgagctgggcgagcatatcgtcggaagccacgaaacggccttcgccgtgggagatggcgatggtgtgcatgtcgcccacctcggtctttgccagccacggggagagattcgacgccacgcgggtgcgcaccagacggctctggtggcggccgatggtgttgaacgtcagcgtcgggcattcggcggtcatcggcacgatgtcgccgtacggcaccaggccgagtttgatcagcgcctggaaaccattgcagataccgagcatcagaccatcacggttgttcaacaggtcacgcaccgcttcggtaacggcaggagcacggaagaacgcggtgatgaacttggcggaaccatccggctcgtcgccgccggagaagccgccaggaatcatgatgatctggctcttcttgatttcctcaaccaaagctgcggtggactcagccacagcagcaggggtgaggttgttcacgatgagtgtgctcacgtcggcacccgcgcgctcgaaggcggctgcggaatcgtattcgcagttgttgccggggaacacggggatgatcacatgcggcttggcggcgccggcgccggtgtatacggtcttcttcggcgcattgaaggacacggtctcaacggtcttgcccttttcatcgcccttggatcggtacgggaacacggattcgataccgccctcccaagcgtcctgcagttcggccagatccagcgtctcaccggctgccacgaactggtaggcctcggtggtctcgccgacctcactgacctcaaccaggttggatacggccggaaccttcgcggtgtcggcaagttcgatgatgaaggaaccataggccggggcgaacaggtcgtccacgctgatgccatcggccagcttcacgccgatctggttgccgaccgtcatcttgaagatagcctcggcggtggcaccgtagccaggcgtggacacggccagcgcatcgccgaaatcggtgaactcctcgactgcggagaacacctccagcagcgaatccttgtccggtgtgaggccgtcggcctggtaacgcggcgcgatgcggatcacacggtgaccagcgcccttgaactctggggaagtggcacgcttcatgttgcccacagccacggcgaaggagatcagggtcggcggaacgtccagctgttcgaacgtgccggacatggagtccttaccgccgattgcgccagcgcctagatcgacctgcgccatcagagcgcccagtacggcggccatcggcttgccccaacgctccggctcgtcgcgtagcttctcgaagtattcctggaagctcagatacgctttctcatgttcgaaaccggcggccaccagcttcgagagcgactcgaccacagacagataagcgcctgtgaactggttctgctccatgatgtacgggttgaagccccaagccatcgcggaggcggtggtggtctcgccgaacaccggcagcttggcgaccatggccatgttcggggtcagctgcttcctgccgccgaacggcatgagcacggtgcctgcgccgatggtggagtcgaaacgctcggaaagacccttgttggaagccacgttcagatcggtgagcatggtgtgcatgcgttcggcgagcgtgccggtcttccacggggtggcgtagccgtgctgcgcttcgacatgcaccacctgatgcttcggagcgccgttggaggcgaggaactcgcgggacagatccacgatcgtgtcgccgttccataccatcgtcatgcgcggctcttcggtcactgtcgcgatgacttcggcctcgagattctcttctttggcgtagcccaggaactcgtccacatcctcggcggccacgtccacggccatacgctcctgggattcggaaatcgcaagttcggtgccgtccaggccctcgtacttcttcgaaaccttgttgagatcaacatacaggccgtcagccagctcgccgaccgccacggatacgccgccggcgccgaaatcgttgcagcgcttgatcagacggcatgcgtcaccgcggcggaacagacgctgcagcttacgttcgacgggagcattgcccttctgcacctcggcgccgtcaagctccaaggattcgacgttatgcgccttggacgcgccggtggcgccgccgatgccgtcacggccggtacgcccgccgagcaggatgaccttgtcgcccggagccggggtttcgcggcgtacatgatcggccggagtcgcggccacaaccgcaccgacctccatgcgcttggccacatatccggggtggtagatttcgtccacctgaccggtggccaggccgatctggttgccgtaggaggaataaccggcggcggcggtggtgacgagcttgcgctgagggagcttgccttcaagcgtctcggacaccggcacggtcggatcggcggcaccggtcacgcgcatggcctgatatacgtaggaacggccggaaagcgggtcgcggatgcagccgccgatgcaggttgccgcaccaccgaacggttcgatttccgtcgggtggttgtgggtttcgttcttgaacaggaacagccaatcctcatcatggccattcacatcaaccttcaccttgacggtgcaggcgttgatttcttcggattcgtcaagattcttcagaataccgttcttcttgagccacttcgcgccgatggtgcccatgtccataaggcatacgggcttttcgtcgcggccaagctcgtgacgcatctcaagatacttatcgaacgcggcctgcacggtcgcgtcgtcaatctgcacatcatcaagttgcgtgccgaacgtggtgtgacggcaatgatcggaccaatacgtgtcgatcaccttgatttccgtgattgtcggatcacgctgttcctcggtgaagtgagcacggcagaactgcagatcagccaaatccatggccaggccacggtcggcgatgaactgctcaagatcggcgtcgctcatggtgcggaaaccttcgatgacctccaccttgcccggtaccggcacctgcgtcttcaacgtggtcttggtatccagcgaagcttcgcgagcctcgaccgggttgatcacataatgcttgatggcggcgatgtcggcgtcgctcagctcgccttcaagtgcatacaccttggcggaacgaacagtcgggcgctcgccctgggagatcagctgaatgcattcgctggcggaatccgcacgctggtcgaactggccgggcagatactccacagcaatcacattatcagaaccgaaatcaggcaaatcggcggaaacattatcgacctgcggctcactgaacacggtaggggtggcctgtgcgaacagttcctcgctaatgccttccacgtcataacgattgacgagacgcacattcttcagcgatgcgatgccaagaatggtcttcagctcgttggcgagctgcttggcctcgacatcaaaaccctgcttcttttccacgtacacgcgaaaaaccatggttgactccttgaaagaggggcttggtgagattgataaaaataagatttttaaaaacgatgaagcccgcatccgagtttgtactgcagatgcgggctatcgcaagtattattcggctacttcaatgccttcggacttggcgagttcagccaagcggctttcgacctcttcgtaagccggaatgatgtcgcccagatcgcggcggaacagatccttgtcgagatgctcgaccttgccggagccgtcacgctgatcccacagacggcaggaatcaggcgtaatctcatcggccagcagcagcgtgccatcggaagtgcgacccatttcgattttgaaatcaacaagcttgatgccgatcttggcgaagatctcgatcagggcttcgttgatgcggcgtgcgagaggtgcgatctcagccagatcctcacgggtgcagacgcccaacgcaaccagatcgtcgtcgttcacgaacggatcgtgcagatcatcgttcttcaggaagtactccagcaccggctccttgagctcgatgccctcttccacgcccaagcgagagcagaagtggccggcggcggtgttacgcagcacgatctcgagcgggaacatggtgaccttcttgaccagctgggaggtttcgcccacgcgggctaccagatggctgtcgataccacgcttcttgagcagatcgaagatcagcgtggtgatgaggttgttcagcctgcccttgccggcgaagtcttccttcttctcgccgtcacctgcggtagcggagttcttgtattcgacccagagcacctccggatcgtcagttgcgtacagttgcttggctttgccctcgtagagcttttccaacttctccattactcgcctttcctggtgtttgggaggtagatagtttggtgaacttgacggttaacaagataccaacgggaggctacaatcgaatggtttttgggcgcgttccggcagtcttccgtcagtatccggcaatagtgcgtcaggcgatgtcgatttcgagcgattcggcctcattctcggctttagcacgcgcgtcggcctcatctgttccgatggccagcgcgaccgccatacgacgatggccgtgcacttccggcttcgcgaaaatacgcagatcggtgcccggctgagacaaagcgttggcgacgttgcggaattcggcttcaccatcgccctgaatgacgatcgcatggcttgccgcgacggcaccgtccgggatcgacaaggcgacatgttcctgcgtaatcggcaaaccgagaatcgcacgcgcatgcaacgcgaattcgcttaaccgttgcgacgccatcgtgaccatgccagtgtcatgcggacgtggggagacttcattgaacaacacggaaccgtcggtcagcacgaacaattccacgccgaacacaccccaacccttctcgtcggaagccttggccttcgccaccagaccttccactgcggtgcacgctatgcgttgcgcctgcgcaagcacatcctgtgtgaaggaggccggttgccaggattcgcgatagtcgccgctttcctgacgctgtccgatcggagcgcaggtcacgatgccggcgctggagctgacggtcaacaccgtcagctcgtaatcaagcggagccaacgcttctacaatcactcgggaaacgtctccctcgtcgtgcgcgcgacgaccttcctgtgcctcaacccaagccgcatcaatcgcatcggcggaacgcaccacggactggccgtgaccggaagaactcataatcggcttgaccacgcacgggtagccaaccgtttttgccccagcgcgaagctcttccagcgagcctgcgaagcggtacggcgtggtcggcaatcccaattcctcatgcgcaagtacgcgcaaacgttcgcgatccatgcaaatggatgcgatttcggcacttggcaccacctgtgcgccacgctcggccgcggcagccaattcgctggtggcgatcgcttcgacttccggaacaatgatgtccggctgaatttcgtcaaacaatacgcgcaactgttcggcattggccatgtcgagcacacggtattcgtgcgccacctgttgtgccggagcgccctcataggaatcggccgcgcatacccatgcgccaagcctcatcagttcgagagcgacttccttgcccagctcgccggagccaagaaacagaacacgagtcggatgcttaccaagcggagtgcccaaggcacgattctcttcagtcatgccttccattgtgccatcggcgtaggatggagtgcatgtctgagacggaacaggaagaaacacagcgacccctgaccatcgccatggtggtcgacacgtcgggaaaccgaggtaacggcacgtcgaattcggcgttgcagtgggcggaggaattgaagcggcaaggccatacggtcaggcttgtgggcattggtgcgcctgaatacccggcacgagtcaaccatgtgcctctggtcagttgggtggcgaaaaagcagcagatgcagttcgccgaaccgagcgacacgctgttcagaaccgcgttccgaggcgtggacgtggtgcacatctacacgccgttccgttttggccagcatgcgtgcaaagtcgccaaacagatgggaatcgcggttactgcgggctatcatgtgcagccggagaacatcacgtattcggcaggtccgctgaaatatattccgggcatcgacaagttcatctactggctgttcaatttgtggctgtaccgcaaaatcgaccatgtgcatgtgccgaccgagcttggcgcaagtttgctgcgttctcacgggtacaaatcgaaactgcatgtgatttccaacggatatgaatcacgattcactgcgaaaacgcagcgcgatgcggggaagtctgctccggttccgttccacattgtcgcttccggacgattgacgaacgaaaagaatcatgtcgcattaattcatgcgatcgcccgttgcaggcatgcgcaagatattgaactgacgattgccggcaccggtcctttgaaaaagaaattgcagcgactcgccgcacgtttgctttcccgaccggcatcgatcggatttcataagaacaccgaaatgcccgcgttgctgcgttccggcgatttgctggtgcatccttcgattgccgatctcgaatcggtgagcgtcattgaaggtatggccgccggtttggtgccggtcatcgcatcgtctccgttgagcgccgcaggccagttcgcgttacgtgacgaatcgctattccctgtcgacgatgtggaagcgttggcaaggcgcatcgattggtgggtcgatcaccccgatgaactgtcgaaatggggcgaaatctatgccgaacacactaaagagcattattcggtggctgcttccgtgcgtaaattcgtggctatggaacgcgaggcgatcgccgataatgccaataagcaaatcaatgcgtaacaatcagcataaatggaaccacatgcgtgataaatgatcgtaacgtaagcaaaaaggcgcgggatgtaattcctgcgcctttttgttgtttgtcgtaatgattatttttccgattgacagcgacgatgcgcgctacagcaatgcgatcagctgctccacctgctcatcggtggtggcccagctggtgcagatgcgcatcaccgtgtgcgtgtcgtcggccttttccatgaagccgaggcgcacattgcgctgcaaacgctcggatgtcgcgttgtcgagcgtgatgaagatctgattggtcggcgcgtcgaaggtgagcgtatagccacgttccaccagcacttcgcgaatacggtcggccgcatcgttggcgtggcgggcgatcctgcaatacagatcgtcggtgaacagcgtgtcgaactgcacgcccagcagccatcccttggcgagcagcgcgccatgttgcttgacgagcgtcacgaagtttttcggcatattgccgtgcgtgaacaccacggcctcaccgaacatggctccgaccttggtgccgccgatatagaatacgtccgcgatacgcgcgatgtcttcaagcgtcacgtcgttgccggttgcggtcagcgcgtagccaagtcgtgcgccgtcgatgaacaacggcatgtcgtacttcgtgcagaccttgcggatcgcctcaagttcggcgagcgtgtagagcgtgccgtattcggtggcctgcgaaatgtagacgcatccggggaacaccatgtgcgtgtagttgccgtccgcgtagaacgtggcgcagtactcgtcgagttcggtcgcatcgattttgccgtcatggtgggggagcgtcagcaccttgtgtccggtgaattcgatggcgcccgcctcatgcacgttcacatggcctgtgcttgccgcgattacgccggcatactgcggtgtgatggagtcgatgatggtctggttggtctgcgtgccacctaccaggaagaaaatctgtgcgtcagggcaggcgcatgcttcgcggattttggctttcgcgctttcgcagatgctgtcgttgccgtaacccggatattggttttgtgcgatttcgctgatgcgttcgatgatttccggtgttgccgtgcaggaatagtcgttttcaaaagacagcatgatgcgctccttgtatctgacctatgctgatgacttgcgaccggctgtttgctgtattcaagccgtccggatagcaaaaaacctcggaatttcttccgaggtctctaccggggtggctaacgcggctcgaacgcgcgaccttctgaaccacaatcagatgctctaccaactgagctatagccaccatgttttcgcttcatgcagaagcgcaacagatgaaaactatacacgattttccagctatgtctacatcggcgtgttgcgcgtgcctgtcgtcggcttgcgctgtggattgttcattatgtgaacggcatattacacaaatccgaaactcacgcgtaccttgtagtcgctgcatgcgtaagggtgtgctgtaatggcggtgtgggccgtctcggagtgtttacggcgtatgcggatcatcggccgaaaagctgtgaaatgtgaaggaagagagattcatgcagaaggtcaaagcgtttggtgattggctcaccaagtggttcaccgcgattgtgattgtgtgggccgtgttcaactatttcgtgccgcaggcaagcttgtggggcaaatcctataccggttatttcctaggtatcgtgctgttcggcatgggtcttaccttgacccttgacgatttcaggcgcattctcacccagcctctgatggtcatcgtcggtaccgtggcccacttcgtcatcatgccgttggtagctgtgctgctgtgctggattttccgtcttgatggtgcgctcgccgtcggtgtgattctggtcggctgctgcccgtccggaacctcgtccaacgtgatgagctatctgagtcgtggcgatgtggcgctggacgtgtccatcggcattttgtccacgttgtgcgcgccgttcatgattccgctgttgatgcagtggctggcttcccagtatgtgtcggtcccggtggaatccctgttcctcaatgcggtcaaggtggtgctgttcccgatcgctcttggcgtgatctgccatgctattttcggcgagaagatcgagaagattacggtcgctctgccgatcgtgtcccaggtggccatcctgcttatcatcggcgtggtcgtcgcagccaacggtccgaagctgttcgtggcttcctcgctgcttgccatcccggtggtcattctgcacaacctgtgcggatacgcgttgggcttcggtttctccaaacttatgtacaaggtatatccgaagggcttccgttatgcacagcagaaagccatcaccttcgaggtcggcatgcaggattccgctttgggagcgactttggcgctgacgtcgttcgcttccaatccgttggccgcggtgccgtccacgttcttcagcgtttggcacaacatttccggttccgtgctgtccagctggtggcgtgagcatgatgacaggcatcagatccatcctgattccgacaatggcgagaagggctcggctgcgaaggcccgcgaagacgctgccgaaacagctaacagctgacattcgtcagtagattccgtcgtcatattgcgcattccctgaatctttcaaaacgattcagggaatgttttgttttgagtggtgcaaacgtgtcattgtgatgttttgttgctttgcgctgatgtaggcaaaatgattgaaattattgggatttaagggtgtcttcacccgtgttttttgttcgttttggggtatactgtaactgaaggccggagttgtggatcagtcgagaattcgtcaggtcgcaacgaagcgccgatggccgtgaggttcatgcgcaacgcctttaagatataactgaacaatagcgattcgaaacagcggcaatggggtagtacggcgcaggcgccgggccgcaaatgcaaaacagacaacgagactgaagagtgcgcgtaaggtagcgcgtagcaaagaagtgggaacctccttcccgagtggatggccccggattcgaaaggatccggggccattccttttgcgatttgcgacacggcatgttggaatgtcttgggaatccgtatactgataattcgtgtgtgccaacggcatgccttatgtgacaggcgtgcgggttgggatatcccggaactcgattgcatcacgcgcagcaatgcgacggtgagagagggatgggccatcgggccggtggactgtggctatcttcacgattcagatgcgtggagtgtgggtgcagtgcggcggtcacacaaaagcaagagaaaccactgaatcggagaattcaagttgcctactattgaacagctcgtccgtaagggacgtcaggcaaagccgaagaagtccaagactttggcactgaagggaagcccgctgcgccgcggcgtgtgcacccgtgtttacaccaccaccccgaagaagccgaactcggcactgcgtaaggtcgctcgtgtgcgcctgagctccggtgtggaagtcaccgcttacatcccgggcgaaggccacaacctgcaggagcactccattgtgctcgtgcgcggcggccgtgtcaaggatctgccgggtgttcgttaccacatcgttcgtggcgccctcgatacccagggtgtgaaggatcgcaagcagggtcgttccctgtacggagcaaagaaggcgaagtaagagatatgtcacgtaaaggaccttccaagaagcatcagctgctgccggatccgatttacggttccactgttgtggcacagctcatcaacaagattctgctcgacggcaagaagtcgatcgccgaagacatcgtctactccgctctcgatatggtcaaggaaaagactgatcaggagccggtggcagtgcttaagcgcgctcttgacaacatccgtccatccctcgaggttcgctcccgccgcgtcggtggcgctacctaccaggttccggtcgaagtgaagccggctcgtgcgaacactctgtccctgcgctggctgaccgacttctcccgcgcccgtcgtgagaagaccatggctgagcgtctggccaacgaaatcctcgatgcctccaatggccttggtgcttctgtcaagcgtcgcgaggatactcataagatggcagaggccaacaaggccttcgctcattaccgctggtaattagtcgagaacgagagttaaggaacactcatggcactagacgtgctcaatgatctcaaccagatccgtaacatcggcatcatggctcacatcgatgccggtaagaccactaccaccgaacgtatcctgtactacaccggcaagaactacaagatcggcgagacccatgacggtgcctcgacgatggatttcatggctcaggagcaggaacgcggcatcaccatccagtccgctgcaaccacttgcttctggaaccgtcagacccatgacgagaagcagaagttccagatcaacatcatcgataccccaggccacgtggacttcacggccgaggtggagcgctccctgcgcgtgctcgatggtgccgttgccgtgttcgacggcaaggaaggtgtggagccgcagtccgagaccgtgtggcgtcaggctgacaagtacggcgttccgcgtatctgcttcatcaacaagatggataagctcggcgctgacttctactactccgtcgacaccatcaaaaccaagctgggcgcgaccccgcttgtcgtgcagctgccgatcggcgctgagaacgacttcgctggcgttgtcgatctgattcgtatgaaggcttacgtctggaacgacgtttccggcgacatgggcgctcactacgacactaccgacatcccggccgatctgcaggacaaggccgagcagtatcgtgcagagttgctcgaccaggtcgcagaatccgacgaagagctgcttgagaagtatctcgagtccggcgaactgactgaggacgagatccgtagcggcatccgtaagctcaccattaaccgtgaagcctacccggtgctctgcggctccgccttcaaggacaagggtgttcagccgatgctggacgccgtcgtcgactacctgccgagcccggaggacgttccgtccatcgtcggtttcgatcctaaggacgaatccatcgagatcgatcgcaagccgaccaccgatgatccgttctctgccctggtcttcaagatctctacccacccgttctatggcaagctcgtgttcgtgcgcgtctactccggcgccgtcaccccgggcgacaccgtgcttgactccaccaagggcaagaaggaacgcgtcggcaagatcttccagatgcacgccgacaaggagaacccggtcgatgccgccgaagccggcaacatctacaccttcgtgggcctgaagaacatcaccaccggtgacaccctgtgcgacgaaaaggcgcctatctccctcgaatccatgaccttcccggatccggtgatcgaggtggccgtggagccgaagaccaaggccgatcaggagaagatgagcatcgctctggcgaagctgtccgacgaagatccgaccttccaggtgaagaccgacgaagagtccggccagaccctgatctccggcatgggcgagctgcagctcgacatcatcgtcgaccgtatgcgtcgtgaattcaaggtggagtgcaacgtgggtaacccgcaggttgcataccgtgagacgatccgcaaggccgtcatgaaccaggaatacacgcacaagaagcagaccggtggttccggccagttcgcaaaggtcttgatgaacttcgagccgctcaacaccgaagagggcgagacctacgagttcgtcaacgaggtcaccggtggccacatcaccaaggaattcattccttccatcgatgctggtgtgcaggaagccatggaatccggcgtgctcgccggcttcccggtggttggcgtcaaggctaccgtcactgacggccaggtccacgacgtcgattcctccgaaatggccttcaagatcgcaggttccatgtgcttcaaggaagctgctccgaaggccaagccggtcatcctcgagccgatcatggccgtggaagtgcgtactccggaagagtacatgggcgacgtgatgggcgatatcaacgcccgtcgtggttccatccagtccatgaccgactccaccggtgtcaaggtcatcgacgccaaggttccgctgtccgaaatgttcggctacatcggcgaccttcgctccaagacccagggccgcgcaatgttcaccatgcagatggactcctacgctgaggttccgaagaacgtctccgaggagatcatcaaggcccagcgcggcgagtgacacgcgctgccgcttaagtggaaactgtctccagtcagcgctagtattttgtagcgctgactgggttcgggctccaaagtggcacaaacccgtcaaacccagtaaaatgtagcgagtgccttgaagtgagttcaaggcttactacgagacgtccaggaggacaaaacacatggcaaaggaaaagtacgagcgtactaagccgcacgttaacattggtaccatcggccacgtcgatcacggtaagactaccctgaccgcagccatctccaaggtcctgcacgaagagtacccggacatcaacccggcttacgacttcaaccagatcgacgccgctccggaagagcagcagcgtggtatcaccatcaacatcgcccacatcgagtaccagaccgctgagcgtcactacgctcacgtcgactgcccgggccacgccgacttcgtgaagaacatgatcactggcgctgcccagatggatggcgctatcctggttgtggccgccaccgacggcccgatggctcagacccgcgagcacgtgctgctcgctcgtcaggtgggcgtgccgcgtatcctcgtcgctctgaacaagtgcgatatggtcgacgacgaagagctcatcgagcttgttgaggaagaggtccgtgacctcctcgacgaaaacggcttcgatcgcgattgcccggtcatccacacctccgcttacggcgcgctgcacgacgacgctccggatcacgagaagtgggttgagtccgtcaaggaactcatgaaggctgtcgacgagtacatcccgaccccgactcacgatctggacaagccgttcctgatgccgatcgaagatgtcttcaccatctccggccgtggcaccgtggttaccggccgtgtcgagcgtggtaagctcccggtcaactccaacgtcgagatcgttggtatccgtccgacccagaccaccaccgtcacctccatcgagaccttccacaagcagatggatgagtgcgaggctggcgacaacaccggtctgctgctccgcggcatcaaccgtgaccaggtcgagcgtggccaggttctggctgctccgggctccgtgaccccgcacaccaagttcgagggcgaagtctacgtgctgaccaaggacgaaggcggccgtcactcgccgttcttctccaactaccgtccgcagttctacttccgtaccaccgacgtcaccggcgttatcaccctgccggaaggcgttgagatggtgcagccgggcgatcacgctaccttcggcgttgagctgatccagccgatcgctatggaggagggcctgaccttcgcagtgcgcgaaggcggccacaccgtcggctcgggccgtgtcaccaagatcatcgagtagtttctgcttgatatcaaggcacgcttgaactagcgttttttaggaaaacctcccgaggcatgttcgccgagggaggttttcctatatatggaaggcttaccgacaaagtatgcacaccgtggcataatgagcaaggctcttttaagctttccctgttagacgaagaaataggtgagttaatttggcacagactaccaatgacatcaagaacggttccgtcctgaacctcgatggccagctgtgggccgtcatcaagttccagcacgtcaagccgggcaagggccccgctttcgtgcgcaccaccatcaagaacgtcctctcgggcaagatcgttgacaagaccttcaatgctggcatgaagatggaattcgaaaccgtcgacaaccgcaacctccagtactcctacgaggacggcgacaacttcgtgttcatggatatgaccacctacgatcagatctacattccgaagactctcgtcggcgatcaggccaagttcctgctggaaggaaccgactgcgtcgtgtccttccacgacggcaccccgctgtccgtcgaactgccggcttccgtgatcctgaccgttacccataccgaaccgggtctgcagggcaaccgttccaacgccggtaccaagccggccaccgttgagaccggtgccgagattcaggttccgctgttcatcggcgaaggtgagaaggtcaaggtgaacaccaccgacggctcctacctcggccgcgagaactgagagtaaggacgaaagaagtttcatggcacgttccaccgctcgtaagagggctctgaatacgttgtatgaagcggatgagaagggacaggacatcctgtcccttcttgctgagcgcattgagcagcccggcgcccagactccgctgcctgaatacgccatcgaaatcgttcgtggcgttgcggaacatatcgcagccatcgattccacgcttgacgagcattccaccggttggaaggtcaagcgtatgggcgttgtcgatcgcaatattctgcgtatcgccgcatgggagatcatgttcaatgatgatgttcccaatatggtggccatcgacgaggcgcttggccttgccaagacgttgtgtgatgacgaatcaccggcattcatccacggtctgctcagcgcggtaagcgctgatgcggatgccgctcaagtggatgagcaaccgaccgaaccttcagctgaataaagctgaaagttaagcgattcggccgggtcgcgagtcctaaccggccgctatccttggtacgaataccttgactataagggggttttggtgaaccagtatgattccgaagccgtgatgtttgaccctcaagatgccgttctcgttctcgaagacgggcaggtgtatgtgggtgaaccttacggcgcgatcggcacgaccagcggggagatcgttttcgcaaccggtatgaccggatatcaggaaacgcttacggaccccagctacgatcgtcagatcgtggtgcagacgttcccacacattggggacacgggaatcaatggggaggatccagaatcctcacgaatctgggttgccggttatgttgtgcgcgatcccagcccgaatgtgagcaattggcgtgccaccggcagcctcgatgacgatttggaatccaatcacatcgttggcatcagccgaatcgacactcgcaagcttgtacgccacctgcgttccgcaggcgtgatgcgtgcaggtattttctccggtgatgctctgcttgacgccaatggcaagctgcgtaccatcgagtccatgcttgacgaggtcaagtccactccgcagatgaaggggatgagcctctacgacgaagtcagcaccaaagaagcctataccatcgagccgtgtggtgaattcgaaggcaagaaaccgctgttcaccgtcgccgcggtcgatctcggcatcaaggccatgactccgcatcgtatggccgagcgtggctgccgtgtacatgtggtgccatccaccatcacgttcgatgagcttgaagccctcaatcctgacggtgtcttcttctccaacggtccgggagatccggaacaggctgatcctgaagtgaacctgcttcgccaggtacttgacgcaggtcatccgttcttcggcatctgcttcggtaaccagctgctcggccgtgcgctcggcttcggcacatataagctgaagttcggtcaccgcggcatcaatcagccggtcaaagacatgaccaccggcaaaatcgaaatcaccgcgcacaaccacggctttgctgttgacgcgccgatcggcgaaaccgttgacgcgccgtttgaaaacggcaagtacggcaaggtgttcgtcagccacatcgatctgaatgacaacgtggttgaaggcctgcagtgcgttgatattccggcattctccgtgcaataccatccggaggccgcagccggcccgcacgatgccgcatacctgttcgatcgtttcgtggatctcatgcgttccgccaaggagggaacccacaatgcctaagcgcacagacatcaagtccgtgatggtcatcggctccggtccgattgtgatcggccaggccgcagaattcgattactcgggcactcaggcctgccgcgtgttgcgtgaggaaggcatccgagtcattctcgtcaactccaacccggccaccatcatgaccgatccggaaatggcggatgccacctacatcgagccgatttccacgccgattctcgagcagatcatcgccaaggaacgtcctgacgcgctgctgccgaccttgggtggccagaccgcgctgaacgcggccatggcgttgggtgaggccggtgtgctcaagaagtacaacgtcgagctgatcggtgcttctctggaagccatcgatcgcggcgaggatcgtgagctcttcaaaaaggtcgttgaggaagctggtgcagaatccgcacgttccgacatcgcacactccattgaagaagtcgacaagatcgccgaaaagttcggttatccgctggtcgtgcgcccaagcttcaccatgggtggccttggttccggcatcgcgcacgacgaagaggaactgcaccgcatcgcaggcgcaggcatccattattccccaaccgacgaggtgctgatcgaagaaggcatcgaaggctggaaggaatacgaactcgagctgatgcgcgacaagaaagacaatgtcgtggtcgtctgcccgattgagaacgtggatcctgtcggcgtgcacaccggcgattccattaccgtggcgcctgtgttcactctgaccgatcgcgagtatcagaagcttcgtgacatcggcatcgccatcattcgtggcgtgggcgtcgataccggcggctgcaacatccagttcgccatcaacccgaacaccggacgcatcatcgtcatcgaaatgaacccgcgtgtgtcccgttcctccgctctggcatccaaggcgaccggcttcccgattgcgaagatcgccaccaagctggctcttggctacacgctcgacgaaatccagaacgatatcacgcagtccactccggccagcttcgagccgaccatcgactacgtggtcaccaaggtcccgcgtttcgccttcgaaaagttcccgggtgccgatccgacgctgaccacttccatgaagtccgtgggcgaggccatggctctggcaggcaacttccaggaatccctcggcaaggccatgcgttccatcgacaagcgtcatatgggcttcaactgggacggcgacaagcctgacgtacaggaagtcgagcagctgttggaagccatcaaggtgccgaccgagcatcgttatctgcagatccagcgcgccctgtggggaggcgccaccgaacagcagatcttcgatgccaccaagatcgacccgtggttcattcgccagtttgtactcatcaacgagaccgcccttgaaatcaaggaagcgagcaagctgagccgcaagctgctaaagaaggcgaagctggcaggtctttctgaccttcagatcgcacacctgcgccacttgggcgacgaaggcgaaaacacgatccgcgaactgcgttggtcgtatgatcttcgtccggttttcaagacggtcgatacctgcgctgccgaattcgacgcggtcacgccgtactattactcctgctatgcggacgaaagtgaactgcgtccgcgtgagcgtgaagccgtgatcattctcggctccggtccgaaccgtatcggccagggcatcgagttcgactacacctgcgtacatgccgtgcaggagctgggcaaggactatgacaccatcatggtcaactgcaacccggaaaccgtgtccaccgattacgacatgtccgatcgtctgtacttcgagccgcttaccttcgaagacgtactcgaaatctacgaggccgaaaagaagatgggtccggtcaagggcgttatcgttcagctcggtggccagaccccgctgtctctggcggctcgtctgaaggctgccggtgttccgattctcggtaccacgcctgaatccatcgatctggctgaaaaccgtgagctcttcggcgaagtgctgaagaaggccgagatgaacgcgcctcgctatggcaccgctctgagccttgacgaagcccgtgaggcggctcataacatcggttatccggtgctggtgcgcccgagctacgtgcttggcggtcgcggcatggaaatcgtgtacgacgacgcccagctgtgcaagtatgtggatcgcgcattgaaggaagctcaggccgataccgtggtttctggccgtctgccttctccgttgctgatcgacaagttcctgcaggatgccgtggaaatcgacgtcgacgccttgttcgatggcgaagagctgtatatcggcggcattatggaacatgttgaggaagctggcgtgcattccggtgacgccgcatgcactctgccgccgagcaccctttccgatgaccagatccgccgtctgcgcgaaggcacctatgccatcgccaagggctgtggcgtgcaaggcctgatcaacgtgcagtacgccttcatggccaacaccctgtacgttatcgaggcgaacccgcgtgcctcccgtaccgtgccgttcgcatccaaggcgaccggtgtggcactggccaaggccgcggcccgcattatggccggcgaaaccatccagcagcagcgcgataacggcttgctgctgcctcatggagacggtggtgacattcgccgcggccagcaggttgccgtcaaggaatccgtgcttccgttcaagcgcttccgtacgccgctcggcaagaccgtagacgtgctgctcggaccggaaatgcgttccaccggcgaagtcatgggcttcgaccgtgacttcccgcatgcgttcgccaagagccagctggccgcctacgatggcggtctgccgaccagcggcaacgtgttcatttccgtgaacgataccgacaagcgtcagctgccgttgttcgctgcgcgactggtggagcttggattcaacatctgggccaccgaaggcaccgcatccgtgcttcgtcgttacggcatcgagtccaagatcgtcgacaagatcagcgtgcgtatggattccaatccggacgatccgatcaccacctaccatgcggagggcagcgtcggcaagaacgtcgttcagctgatcgaagagggtgccattgatctgattctcaacacgccgaattctcgtggctcccgttccgacggttacgccatccgttcggccgctattgccgcggatttgcctcagttcaccaccatgacggaattctccgccgtgttgatggccatcgaggccgtgcgtaataatgattatcagatcatgagcattcaggatcattcccagcagctattcgagttggaaagccgtgagtaatgatgagcagcctcagcagtgaagaaatgagtgcccagcgttcggacttcggtctgcgactgagcaattccatggcccaatatggtccgctatgcgtgggaatcgatccacacaggcagcttcttactgactggggctacaacgtagacgcattgggtgccgaactatactccatgcgtatgctgcaggcagccaatgggcgagcggcagctgtcaaattccagttctccatgttcgagcgctacggttcgaaaggtatcgcagcgctcgagcgggtactgtacgcagcccgtcaaatgggtatcatcaccatcgttgactgcctgcatggaggcttgccgactacggtgtccgcattcgccgatgtctatttcaagccgaggtctccgttgcttgccgacgccatcactttgctgccatattatggcgcacgctcgttgggcggtgtcattaacgatgccctgaacaacggtcgaggtgtattcattgcatcgctgacctcgaaccaagagggcgccagcctgcagaccgccattcgtcaggcaggcgagtacaagggcagaacagtggcgtacggcattgccagcacggctcagaagttcaataagggcaatgacggtatgggttccgtaggcttgatcatcggtgccaccatcggtcagtggatcaatgattccggtgtcgatccagccaagttcactggtcctattctgtctccgggctacggatggcagggtgctgaaacccgcgacctcaagacggtgttcaaaggcaccaagggcaatgtgctcgtcaccgtgtctcgcttcatcgccacgcatggtccggatatttccagtttggccgcggctacggaatccgtggcgctcgatattcgtcaagcgctcatcgaggcccagaacgaagtcgatgatgagattttggatgatgaagaagacgagtaaatcatcatcgatttgtcaacaataattccttcttgtaaatatcttcagcaactaatacagagtgaggaagcaatgaccgactcccagcatggccgtttgatcgtcctttgcggaccggcaggtgtaggcaaaggcactgttctcgggcgcgtgcgcgagcagcatccggaaatctggctgtcggtatccgtaaccacacgacagcctcgtccaggtgaagtggatggcgtgaactatttcttcatgcccgaacaggagtttctcgacaaggaagctgccggtgagttcttggaaaccgccgacgtgtttggtctcgcacattacggcactcccgtgaaacctgtcgtggaacatcttgagcgaaatattccagtcattctggaaatcgatattcaaggtgctcgcagtgtcaagcagcgtgcgggggagttgggtatcgaggtaatgaccgtgttcatcgcgccgccgtcatttgaagaactggaacgacgcttgatcgggcgcggcactgaaactccggaacagcaggcgaaacgattggaaaccgcaaaaatcgagcttgccgcggaatcggaattcgacaaagtcatcgtcaataatgttgtggatgaggcagcagatgaactgtggaaccttatcgcaacggaattcgatttgtaatcataataattacaaggattgcaatatgcgctcgaacatatcgggcgcatatttttatataaaagaagccaagtatgaaataaaaatgaggattgcgcagcatattaactgcacaatcctcattatgttatttaatattcgctaggatcaggcgagaccggaaagcttgttgatcagctccggatcgcgcgtggcacccttgtctgcggaacgggcgaacgccgcgtaggccttcagcgcctgggagaccttgcggtcgcggtgcgccacatagccgtcgccggattcgagttcggtgcggcgctgggccagctcttcgtcggaaagctcgacgttcaccgtacggttcgggatatcaatgttaatgatgtcgccgttcttgatcagggcaatcgggcccttgtttgccgcctcgggagcgatatggccgatggccagaccggaggagccgccggaatagcggccgtcggtcagcatggcgacctgcttgccgatacccttgcccttgacgaacgacgttgggtacagcatctcctgcatgccagggccgcccttcgggccctcgtaacggatgaccagcgccataccgggcttcagagtgtcgttgaggatgacctcgatggcctgttcctgggattcgacgaccagtgccggtccacggaaggtccaaatctccttcggcacaccggcggtcttcaccacgcagccgtcaggggcgaggttgccacgcagcacggccagaccgccttcggtgacggccggatgatcgatgtcgtgaatcgcgccgttcacacggtcgcggtcgagggagtcgaacagcgtggtatgcgtccacggatcaggggacacgatgtgacccggggccgccagatacatctgcttggcttcctcggtgcaggtatcacgcatgatgtcccagtcgttgagtttgtcctcaagcgtcttgtaatcgatggaatgcacgtcgcggtgcagcttgccggcacggtcgagctcgccgagaatgccagtgatgccaccggcgcgatgcacgtcggagatctcccattcgccggacggcgaagccttgcagatgcagggcacggtgtgggagatgcgctcgatgtcgtcaagcgtgaagtccacgtcggcggactgcgccatggcgaggatatgcagcactgtattggtggagccacccatggccacatccatggtcatggcgttctcgaacgcttccttggtggcgatggaacgcgggagcacagtctcgtcatcatcgtcgtaatactgcttggcgatcttgacgatctgctcggcggcgcgcttgaacaaatccttgcggtaggagtgcgaagccagaatggtgccattgcctggcagggccaggccgatggcctcggtcaagcagttcatcgaattcgcggtgaacatgccggcgcaggaaccacaggtcgggcagacggtcttctcataggcgagcagatcctcttcgttcagattgtcgtcggcggaggcatacatcacgtcgatcagatcggtgttcttcttcacggttccgtcgggaagtaccgtggtgccggcctccatcggaccgccggagacgaagacggtcgggatgttcagacgcagagcggccatcagcatgcccggcacgaccttgtcacagttcgggatgcagatcagggcgtcggcacagtgcgcgttcacctgatattccacggtgtcggcgatgatgtcacggctcggcagggagtacagcatgccggtgtgtcccatggcgatgccgtcgtcaacggccatcgtgttgaactcacgcggaatgccgccagcttccttgatggcctcggagatcagtcgaccaaccttgttcaggtgcacgtggccgggcaggaactcatcgaaggaattggcaatggcgatgatcggcttgccgaaatccttaccgtccacgccagcggcacggtagagggcgcgtgcgcccgcgaatactcgtccattcatcagttttgcagatcgcatttccatgttctctattgtggtggttaagcgggacacggttttgtcaagagtcactatgtggaattcccagaagcgttatattcgcgagcattgccgaagatgcttgcgcttgccgaaaacatgagagaaagggcttgaatcaggtccagtggcggccctatacttaagactttggaaaagaagcttttggcttatctgatgattgggagataatcaatatggcattcggcactcagccaaccccgaccggtcttgcggaaccgccgatcgatgacttgatggagcatgcggactccaagtacgctcttgctattttcgcagccaagcgtgctcgccagatcaattcctatttcacccagctcaacgagggcctgctgcagaacgtcggtccgctggtggagtatcagaatcaggaaaagccgctatccatcgctttccgtgagatcaatgatggtctgcttgaagagaccctcggcgaagacgatctgaccgaaggcaactgatgtaacggttcttgcgataagaaccggattccaagttttcattcgccccgatatctgagcggtgcgctttgaatagtccatagtgaagctattgattgcgtatgcgaaggacggggcgttttttcgtagcaatcagaagggcgaacgtgtggggcgttcgtgaaaggagcagccagatggctgaattgaagttgatttccgctgagtcagtgacggagggacatccggacaaggtctgcgatcagatttccgacgcgattcttgacgatatgcttgctcaggatccgcagtcccacgtggccgtggagacatgcgccacggttggccagttcttcgtgttcggcgaagtgacgagtgaaggctattccgatattcagagcattgtgcgttctgtggtgcgcaatatcggctataccagttctcgcgttggtcttgatgcggattcatgcggcgtgaccgtttcgttgaccgagcagagctctgagattaatcagggtgtggctcgtttgagtggcgaagcggagtcgaaggcatctcgcgagcagcgttatgaggctcagggcgccggcgatcagggcgtgatgttcggctatgcgtgtgacgagaccgatgtgctgatgccattgccgatttatttggctcatcgcttggcttaccgtcttactgaggttcgtaagaatggcgaagtgcctcatctgcgtcccgatggcaaaacccaggtgaccattgaatatgatgagcatgatgctcccgttcgtcttgacacggtgttggtgtccacgcagcatgatcctcaagtcgatcaggcgtggcttaaggagcagttgacggaacatgtgattcgtcctgtgcttgatgatgtgcttgccgatcgtgtggcgcatgatgaatatcgcgtgcttgtcaatccgaccggttcgtttgtgttgggcggtccggctgccgatgccggtctgaccggtcgcaagatcatcgtcgacacgtatggcggtgcggctcatcatggcggtggcgcgttctccggcaaggatccgagcaaggtggatcgttccgctgcctatgcggcgcgttgggtggccaagaacattgtggcggcaggtctggcccacaaggttgaggtgcaggtggcgtatgccatcggcgtggccgatccggtgtccatcaatgtggaaacgtacggcactgaaaatggtgtgactcgcgagcagatccagcaggctgtgcgtaaggtgttcgaccttcgaccggccgccattatcgacgagcttgatctgaagcgtccgatctattccaagaccgctgcttacggtcatttcggacgcaacgatgctgattttacctgggagaccaccaataaggtcgatgagctgaaagccgccatcgaaggctgagttacccttgaatcatgagtactgaggatgccgagcagctggcgcttgacgggctcgccccgcgcaagcggcgcaagcgtgcgcccgcggttaaaacgccggctgcggagcatcccatagcccaagtggtgctggatattcaggccatccatttggggcaaaccttcgactattacgttgaggagaagtattccgaagccgcccagcccggcgtaatggtgcgtgtccgcttcggcgggcaacgggtcaacggcatcatttggaaacggaccgataccagcgaaacccctgaatcgtcattgcggttcatcgaacgggtggtcatcgatcgtgtgcttgtgtcggaatccatgcgtaacgatgccacacttatcgcggacgcattcggcggaacgcgagccaatatcctgcgtttggcggtgcctccgcgcgtggctcgcgtcgaacaggaacaacgtatcggcaatcgaacgggtattgaaaaaaacggacgtatcgaatcgcttgccaagatcgagcgggaatcgtacgagcagctgcagcggcaatacggtaatatcgacctgcttcgtacggcattggaagggcaacgtttccaagcgttcgtgctcgacccattgccgggatcccatcattggaggcagtgcgtggcctggatggtggccgcggccttattgcagggcaaaccggcggtactggtgttgccgaccatgcgtgagattgaggacatggccgaaacgttgcagtcgatcggcttgcgctgtttcgcgccaacccaatcatccaacggtgcgtacggcggcgatttcgccattctgaacgcgcagatggcgcctgctgaacggtatcgtgcgtatctggccatcagtggagggcaggtgcggtgcgtgatcggcacacgggcggcgatgtatgcgccggtggatggcaatgcgttgttcctcattctcgatgacgtgtgctatcaggatgccgatggcatgatgccttacgccaacgcccgcggagtgttgcggttacgtgcaaaagcgcataatggcgtgttcgtcgcgatggccaatgcgcgcagtgtgcaaagccagtgggaaaccgatgcggcgcatgtcggtgccacccaggtcagcggtttcagtacgccgattcacgcattccctgccgtaaccaaggaagcgagtccttggattcgttggctgaaccgtgacgaattggcaagacttgcggattcgaccatcggagcgcgtgtgccgcacactgcggtgcgagtgctgtcgaaggcgttggaaagcggtccggtgctgttgagcattccgcaggatggcatcggtgaagcattgagctgcgcgaaatgccaccgtcaggctcgctgctcgtactgcacgggtccattggaacggttacgggatgggtcggtgcgttgtcgttggtgcggtgtcgccactgtgcaatgggcttgcccggcatgccataacgaacgtatgcgcgtggttcgtgtgggtgccgccggaactgcgcaggagctgagccgactgtttcgtggcgtgcccattgtgctttcaacgccgagccagccacgcggcattgttcccgatatcgggtttgcgccgcagttggtcatcgccactcccggcgcagaaccccgtgtacgtgggaggaacccctcggaatgcgaataccgggccgtggccattctcgacgcatggaccagcttgtacgccttcggcattgacgcgggcgtagacacgttgacgtcgtggatgcgcgcggtttcgctgtgcgcgccgcgaatcaggggaggtcaggccctgttgatcggcgaaaccgatcccacgctcgctcaatcgttgatgctttggaattcaacgttgctggcgcaaaccgaattgcgggaacgtgaacaaaccgcattgccgcctgtgtttgccgccgcatgcgtatggggacgtcgtgacgcggtgaaggtcacgctggaacgtatcggcgcgttgggtgggggtgacctgtccgccatcgaaaccaccgaaggcatgctgccgtccgtattggggccggtacctattccgcagcctcggaccattgattcgcgcgaattggaaggcactgcggatcgtgtcaaggcggtggtgcgtgtgccgcaaagtcgccgaggtgagttggcgttgcgtttgcgttccgccagtgcccgccatgtggccgcgcgcgaaccgggagaactgcgttttcagcttgatccgaaggagcgaatctgacgcacgtcccctcgccgtgaaaaactagacaggttggcagttcggcatgaggccgcacagcagtgaatggaggatcatatgaagggttggcctggagagcctgatatggagtacgacgtgctcatggctgacggcgaagctgcggtgaatgcgggcaagccgatcaccgatgtgattttcgatttcggcaacgtgctcgtctactgggatccggtggccgtgatgacgccccgctatagcgacgagcttgttgaacagttccttgacaacgatatttccggcttctacgacatcaacgatgaactggactgcggcatgtcgaatgatgacggcgtcgccctgatgcgtgaacgttatggagacaaatgggccgacatgctgcagtactatctcgacaatttcgtcgactcgttgaccggcgtggtgccgggcgcccgcgtgctcatcaacgatttgaaagcggccggcgtgcgtgtgtggggattgagcaactggcagaaggatctgttcccgatcgcgctcgacaatttcgatattctgcgcagcctcgacgatcgtgtggtttccggatatgtctccctgcgtaagccgaataaggatatttacgagttcgcgttgcaacagttcggcattgacgcttccggcgcggtgttcgtggacgataaggccatgaatatcgtaggtgcgaacaatgcgggcattcgtggcgttcgattcaaggattcacgtgcgttgcgtgcgctgctgattgatgcgggtgtgaagattcccgcggtgcatcaggcatagtgtgttgcgttccgctgccttacatgctgttgatgcggacggaatgattcccacgatgataacgatgtgatgaggatttgataaggaggacttttcgtgctgaaagtgctgtttgccggtactccggatgttgcggtgccgtcgttgaaaatgctggctgaagataccgagcgtttcgaagtggtcgcagtgctcacccgaccggatgctcctaccgggcgtggacgcaaactggtaccgaatcccgtgaagcaggccgctcttgatcttggtttgccggtgattgaatccgatccgagcgaggaaacgttcatttccgaacttgctgcgaccggtgcccaggccgcggcagtggtggcgtatggcaaaatcctgaagcaggatgtgctcgacgcgctgccgatgggatggtacaacctgcacttctcgctgcttccgcagtggcgtggcgcggctcccgtgcagcgttccatttgggcgggcgagaaggtgaccggagccacggtgttccgcatcgtgcgagccatggatgccggtccgattctggcgcagtccactgtggaaatcggagcgcatgaaacggcgggtgagctgctgaaccgtcttgccgaggatggttcccgtttgcttgccgcctcgctgcaggccatggccgacgatcagatcgcgcctgtggaacagcctgccggcgcatatgaggtggctcagaagatcacggttgaagacgcgcatattcgtttcgacattcctgtattcgcggtggatcgtcagattcgagcctgcacgcccaatccgggcgcatggtgcgaactgcacgccaatgccgaagcagaaccggccacgttgcatgtgttgcgtgcgcagggcgccgatatgagcaatcccaacacacccgtttcgctagaaccagggcggatcgtggccggaaaaaagaacgtgtgggtgggtacttcctcagatcctttggaattgctggaagtcaaagcccaaggcaaaaaagccatgcgtgccgccgattgggcgcgtggcgcgcatctcgacggagcctactgcaagtagtgtcgaataaacggatcataacgatattgccgtgtgaacatcatcatttcacacggcaatatcgttatcctgcaatatcggattttgctatatcgcgactcggatctatcgggattcgcatcatcgaagaatgcgaatcaacgaagaaaatcaagaatccgggtcaaatcacgttcgttcacacgatgcggagcatccgcctgaaccgcaggcttggcgcagaacgccacgccaagtccggcggcatgaatcatcggcagatcattggctccatcgccaaccgcaacagtctgacccatgctgatgcccatgcgcgaagcccaatcacgcagtgactgcaatttcacatctttcgtaacgatatcgccaagcacatggccggttaaacaaccatcagcggcttccaaacgattcgcaatccaaaaatcaagatgcgcgtcggcggcaagacggtccacgacttcatggaaaccgccggaaaccacgccgaccttccaaccatgcgcatgcaaagcgtcaatcaaatcaagcgccccctgtgtgaaatgcacgcgacgatacacatcatcgaacaccgaagtcggcagatccttaagcagcgcaacacgagcctgcaacgcctcgcgaaaatcaagttcgccattcatcgcacgtgcggtaatcgacgcgatctgttcgccaattccagcggcggcgcccagctcgtcgatgacttcctcatcgatcagcgtggaatccacatccatcaccagcagtccaggctgggaaagggtgggagtgggcgcaatgttcggcgattcttgttcaagcatggttttgattgtcggaaatcatgaggacaatgggtattcttaagggttgagcatgttgaatgcgaatgcgccatgacatgacgaaatgacggaacggctcgaaacgcattcggtggaaagcgaggctgatgcaatggatcaacgtgatgagacgttggcgtcgttgggtgaggccaacgaccagttgatggccaagaatcatgcgttggccaaggcgttgagccgtgccacccaggagctcaccaaggccaaggcccagctgaaccagttggcgggaccgcccatgaccttcgccaccatggttcgcgtgcattcctctcgcacggacgaacagggggtacagcatgccagcgccgaggtgatttccggaagccgtcgcatgatcgtgccggttgcggcgaatgtgcaggcatccaggcttgaggctgggcgcacggtgctgctcaacgagaacatggtggtggtttcgcaagccggcaccgatgctgtgggcgcagtgcgcacggtgaagcaggtcattgatgatgggcgattgctggtcgcggatggcggtggaaacgttgcgttggtccgccgttcgggagcgctgtcgaaaacttcgatcaatgtgtccgaccgtgttacggtcgattcgtccatgagattcgcgcttgcgttggttcccgcgcaggatgatgccgacttggtgcttgaggaagtgccggatgtcacgttcgctgatatcggcggtttggatgagcagatcgaacgtattcgcgatgccgtgcaaatgccgttcctgcatcgcgaactgttcgaacgttatgatttgaagccgccgaaaggcgtgctgctgtatgggcctccaggcaatggaaagacgctgatcgccaaggctgtggccaatgcgctcgccgaaggcgctgccggcggtcgtggcgtgttcctgtcggtgaaggggccggaactgctcaacaagttcgtgggcgagtcggaacgcctgatccgcatgattttcaagcgtgcgcgtgagcgtgcggcggatggcaaaccggtgatcgtgttcattgacgagatggactcgctgctgcgcactcgtggatccggcgtgtcgtcggatgtggaaaccactattgtgccgcagtttttggctgaacttgatggcgtggaaacgcttggcaatgttatggtcatcggcgcttcgaaccgtatcgacatgattgatccggcggtgttgcgtcctggtcgtttggatgtgaagattcgtgtggagcgtccgaaagcggctcaggcggcgcagatcatccgccattatctgaccgacgatttgccgttggtgccaggggtggatgcgaaggctttgattggggtgctggtcagcgatatctattcgacggacgagcaccggtatctgtgcgacgtgtgcgatgagcatgggcaatggcatccgatctatctggcggatgtggtgtcgggtgcggtgctgaaaaacattgtggatcgtgccaaaacccgtgctgtgaaaatctccatcgaaagcggacagccggcggcgattggcgtcgatctgttggcgaaggccgtcgacgaggagtttcttgaaacccgcgatgcggtgttggacgccaatccggaacagtggagccgtatcaatggtttggaagcagggcgcatcacccgtatacgaccagtcgaataatgctggcaggcaacgcgaaatcagacgaagggaagtcgtatcaatgagcgttcgtcgaatcatgggcacggaaacggaatacgcggtttccgctctcggaatggagcattacaatccggtgaagctatcgttcgatgtggtcggtgccgcggcgaacgaacaaaccaagcatattcgctgggactatcggcaggaggatccggtcaacgacgcccgcggcaccaggctggaacgtgcatccgcgcatcctgatctgttgacggacgcgccgcagctcaacatcaccaatgtgattgcagtcaatggcggccgtgtgtatgtggatcatgcgcatcctgaatattccgcgcccgaaaccgatgatcccttcgatgccgtgctctacgaccatgccggcgatctcatcatgcgtgagtgcgcgcgcaaagccagcgaacagaccggtatcgcaatcgcgctgcaccgtaataatgtcgacggcaaaggtgcaagctggggcacccacgaaaattatatgatgctgcgttcggtgccgtttgaccaagttgcgaaactcatgacggcacattttgtagcgagacagatttttaccggatcaggtcgcgtcggtatcggcgaacgaagcgaaaccgccggataccagctcagccagcgcgccgactattttcatatgaaagtcggtttgcagaccacattcgacaggccgatcatcaatactcgagacgaatcgcacagcacggatgcataccgtcgattgcatgtgattgtcggggacgccaatcgtatggatgtgccgcaggcgctgaaactcggcaccaccagcatgctgctgtggctgcttgagcatgccgaagaggcgggattgaacatagacgaagcgttggggccaatcatgctcgccgatccggtgagcgccatgcacgaggtgtctcatgatttgacattaggtgccatgttgccgctggaatatggcggcgagacctcggcatggcagattgaggtcaccctgcgtggcttggtgtatgctgccgctgccgtgatctatggaaccgacacgtccggtgaaccggcatggtctgaccgttcgacccgtaacatcatggcgatgtgggggcaggcgctcgccgatgtggctgccatcaggcatgccgatgatgatgcgcgtttgacgatgcgcgagcaagctggccgcattgaatggctattgaaatggcagttgttggagaagctgcgtcgtaaaattggctccggttgggatgatgcgcgtattgcggccgtcgatttaaagtgggctgcgattgatcccgctgactcgattttcgatcggttgcgtgcccaaacggagcggctgtttacggacgggcagttggtgcaggcttcggtggaagcgccttccgatacccgtgcttggttgcgtgccgaaatgattcgtcgttttccagaacaggttgtggccgcatcgtggtcgcatcttacggtgcgccatcgaacgattggtgataataccgtggagaatccgatggtctcattggatatgtcagaccctctgaaatatagcaaatctcaatgttcccgctattgtgagcgtgtccaagatgcggcgtcgattttggaaatgttacggtgaaatgcaatctgtgcgggtaacattgccatcaattggtcgcgaagaacgaccattgacaacaggtaacatcatcccggtattttgaggagaggacgtgccgggactgtacagaggaaacgaaaaggcatatctatggaactgaggcaaatcgccctcgaagtcgcacgcatcctgcaggacgcaggcaagcatgcgttgaacgaccagatgaatccgcacgacatgagaaaactggaagtgtccgaagactgcttccacttcacttcagacaccgacaagcgcctgcagcagttcatcagcaaccgcctgacctatgtcaacgtgttcgacggcttctggcagcttcgccctgaacagtgctatcccggccagcgatactggtgtgtgggtggcatcgacggcgtgatcaatttcgcgcgaagcatgccggaatgggccatcaccgtgacattgttcgaattcaacgaccagtgctccgcacagccgatcctttcgattgtgcacgctccggcgctgggattgacgtatcttgcggtgcgtggatccggcgcgattcgtattcgcaagactccgttgggagacaaacgcgagaaaatcattccttccaccacgtcgtccctcgatggttcggtggtgagtttcggcatgtctccggtatcgtccgaatcgcagcgtgcgctcgatgtggtggcgaagattgccggacgtcctgccgatattaaacgtgtcggcccggcgtcccttgatttgtgcaaggtggccgacggtacgtacgatgcgtatttcgaaccgcacttgcatgagtgggacgtacctgccgtgtctgctggtgctgtggtgatttgggaggcgcaaggccatctgacccagtggaacggcgaaagcgttcactggcgccaggagaacgatgtgatggccaccaatggtctgatcaccaatgatctgagccagtatttggcatagtgttgcatgctgcgccacacctgatataaggtgtggcgcagcgtttttttgcaggtttgcaaccggaagttacagggaggaatgtcatgcctcaggaatttgaacaggctcaatccgcatccgcaggccaagaggtgggtgacattgtcgaatccgccggcgtacaagtcgacggaaccgctgatgcgttggatgccgtgcttgacgatatcgaatcggtgctcgagtccaatgctgaggaatatgtcggtagtttcgtgcaaaaaggcggcgagtgatgccgcagctgcgagacagcggcaatcattcctcgtcaccgcttgatgcgggaacgttgcgtgaggttcattctttcgctcgtattttcggcattgaaacggaatacggcgtcagtgtgaccggtgcggatgtgccatgcgacgccagccagacggcaatgatgatgttccagccgatcgttgcctccgcgcgatcgaccaatacgtatattgaaaacgggtcgcgactgtatcttgatgtcggatcgcatcctgaatatgccacgtccgaggcctgcgatcccatggatgcccttgccgtggatgcggccggcgaactggtgatgcgcgatcttgcgttggacgcccagcaaaggcttcgagccacgcatgggccacgtgccacagtgcatgtgttcaaaaacaatgtggattccgcagggcattccttcggctgccatgaaaactatctggtacgtcgttttgtgccgttggacgtcatcgaacacgaattgctgccgttcctgattaccaggcagctgttcactggcgcaggcagggtgacggaatcaggtttccagatcacgcagcgtgccgattttctggatgaggctgtctcatcggcgaccacaagatcgcgtccaatggtcaacacgagggatgagccgcatgccgatcccgacgccttccgaaggctgcatgtgatcatcggcgattcaaaccgttctcaatgggccacgatgatgaagctggccaccacgcatctggtgctgtgcgttatcgaacaggctgggcgtgaaggacgtgagtcgggattctcgcggttcgcgttcgcggacgccggtgccgcaaaccgtgcggtcagtcgcgatatgagcggcgtgaatgcttcgtttgccatggccgatggatcgacgttgcagggtggtgccgtagccatgcaggaacgttatctacaggctgtggaacagttcgtggatgagcatccggaagtggcttcgtcgttgcctcgcaccgatgtgcacgatgtgcttcgccagtggcgcaatacgttggaagcgttccgttccggcaatgcaaatgctttgggagacagagtggactgggtgtgcaagtaccgcctgtttgaagcgttacgtgcccgttccagtgcggatcttccgctgagcaagctggaacagttggatctggactatcatgacgtggccaatggcgcgttgtatgcgtcgttgcttcgccgtggtgccttgcgttcgctgattgacggtcgtgaggcgcaaaaggcgcgtaccatgccgccggcggatactcgtgccgcattgcgcggcagattcgtcagtgcggccaaatcgcatggcgcgcagtattcctgcgattggaccagactatcgttgcatgcgccgcggaagatggatatggtgctgctggatccgttccaatgcagggagaatgaggatttccaagccatgattggcgctttggagtaagcgatggtggcaatgggaaacgtcgatgggagtggggtgtggccgacaggcttcggtcacaccccactcccatatcggtatgttctcctgaattgttttgcgattgcgctgcggtcgctttcgtttttgattggcttgaatcaggcttcgccgcgatatttcgccatcatctgcgattgcagctgttgcgcgcttggcggcgtccatgtgatggcatccgcgcccgcttcgatggtggcgaggatgcgatcttcggatccgcctcccgatgccaggatcggtatttccggatgatgcgcacgtatgcttgccacgacttgcgcggtgcgtgctccggctgcgacgttgatgatggccgcaccggcgagaatcttgcattcggtgatttcgtcgtcttccgtgactgttgcgataacgggaatgtcgaccatggacatggtggtttcgatggtttccgctggtgccggcgcgttgatgacgacgcctgccgcaccttgcatttcagccaccatggccagctcggtcacacgcggaccggtggtggtgcctcctccgacgcctacgaaaagtggcatttgtgccacagtgagcaacgcctgtgtgatcaccggttctccagtgaacgggtagacggcgagaatggcgttggcattggtattacggatgatcgcagcgtcggtggtataggcgaacgatttgagcgtatggcctttgactgtgatgccgccgcaatgttgcgatatgactgcgggtactctcgcattgggggaggagaggcgaccttcgatgcgtgcggttccataacgggttcgtgacacatgtggtgttgtggaatgctgttccacggccacggcttcactgggagtgaacagggatcgtttgtcgatgcggattggtttgggggcatttgcttcgggaatggtctcctgctcgtcgctcattcctgcacctccgtatctgtgtgattcagcataaggaattcatggatggctttgcgtcgctcgacaacctcttcatcgagaatcctggtgtcggtgttgtcgatgatgcgctgcagaagttcgctgagggtggaaagatcctcggtgctgaggcagtcaagcatgtgcgttgccgtgtcatggcttttgggaagttgttgcagcggtggcacgccacgacgtgccgcttcgacgttgcatactcgtgtggcggctcgtagcgcggtctgtgtgcgtgtggccttcagcttggtatgcagcagcagaatgttcaattcatgcagttgattgatgacttccttgcgttgatcggtcatgtctctctccatctatatggacacgatgtctaatatatatgcatagtgtagcgcagaatgacgcttgtacaagtgtcatgaacgacgaaagccccgaccgtcatggtcggggctttcgtcgtgtaagcaacatatcagtacatgacttacttggtgacagccttcttcagcagggagccggcggagatgcgaacgccgtaggttgccggaatctcgatggtctcgccggtgcgcgggttgcgtccggtgcgggcggcgcgcttgacgcgctcagcggagaacaggccggtcagcttcaggccttcgccggactgcatcgcctcgacgaacacgtcctggaaagcgttcacagctgcctcagcctgtgccttggtcaggttggacttctgagcgatcttcgagacgagatcagacttgttgtatgccataaagcatccttcttgggtcaggggacattctgattacgaacatccacgttctctatgatattagcgcactcttatgaggaaaatggcattttacaagggttttggtcgcttttttgaaaatcagggggaaaacaaagtgtacgggggtgtttgtcagatcaaattatgcatgtcaagccatttcatggccaacgcaccgaccggaatacgcaaccagtagaaggcgattcggtagacaagagtagcggaaaccgcgatggaggaggggatgcccacggcagtgaacgccaccgacaacacggcctccacggcacccagaccgccaggagtgggaaccgcggagcccaaagtgttggcaagcaggaaaatgaaggtggtttccgcaggattcgtgtggtatccaaacgccatcaatgctgcccagaatcccagtccggtcgcaaggttaagcaccagtgcgccggcaatgccaagggccagttcctttggccgtgcaagcacattgaccaggttgcgcgcgtatgctttgaccactggaaggtatttctcggtcaccaaatgacgcactggaggaatcgccatggcggctgacacaaccaacgcgacgatggcgatcaccatgatcagcgtattggtcggaatcatgccggacaatgtgttgcggccggtgaataggccaatcgtcagcaacaacacgatggtagtgcctccctgtacggcccagaccgcgctcataaccgcggtcgcagccgtactgcgatagccgcttttacgaaggaactgcaggttgacgaatgctggaccgacgccggccggcatggacaccgcagtgaaaccggacgccatctgagagcaatacaagccgatcgtgttgcgtttatcggaatccatgaacacacccaaggtgatagcggaaccaagccacgccacaaagccaagcgcgacgcaaaccaacgccatggcgagattggcgtctctgacggccttgatcatttcggccggctgaatctgggtgaacaccacatatacggcgaccaccagcagcgcaatcgcaatgaacgagcgaagactgaaccgggaaagcgtgactttttccatggaatccgcgacatcctgcggagcgagcgccgaaatacgcgtacgtaaatcggtaagcacatgcttgtcccagccaggcaatgcgcgcgtggaagcgggaatggcagccttctgtatgaagggtgccaaatcgatcagctgctcgtctccccaagtcctgcgagcgcaggcgatcgcacgatcattgccattgagtgtggcaagaagaaccagcaactgtactttgtcgagtgcgaagttcggagcggaactgccataatcgccattatgccaacctgcgattaccggatgcccgttttccatgcgggacagggtttccggagtgatgcgacgatgggtgaagccatgatggtgtgctgtggtgagatattccatgaacgcttccatatcatggtcggacatggtgttttggttgcattccaatggcatgcggttgcggtggaacaccagaatggaggattctccataatcggccacaccatacacgcgcggagtttccaaaccggcattggacaggccgagaatcatggcgtaatgatggtgcatggcgtcaaccgaggaacggtcgcgacgcatggaaacaccggtcaggcgaagccactgccatacttggttgagatatccggccgcatgcacttgattgtcgagtacggaaacggtgtattgcttgccgtcatagtcgacaacatcgtaaatacgggaattttcggtcagatcgtcatccagcgtggccttcaatactcccgaatcgacgtagggggcgactcggcgggtgagcaatgatgtgttaataccgatggaacgcaatgattgcgcgatttgtgatccccacgcgccattgttctgcgtgcctatggcgaaacggatcagcatgccgataacacggcctatggcgtaggatgcgatgacgccagccagtgaattccatgaaagcacgaccatcagcactgccactgcatacagcacgttccagccccatttggtgcatgagcggatacgccgagggccggagacggtgaggaacgatgccatggcggcataaaaatcggggagcagtccagtgcctacggatgtgctgttggattgcagtggaatgatcagcatggtattgccggagttgctgatcagcgcggatatgccccacaccgcaaagaatccgaatatgagggaaaccacggaaatcacgctttgcagccactctttggaagtaagcagctggatgagcacgctgacggtgatgcatacgatggcaagctgctgcaataatgccgagggaacatccatcagccagctgaccacgcggccggcggaatgaacgtcggattccacgccggacgcggtgccatgcaagtacacggagaacagaatcacgcctatgccgagcaccaaggcgaagaatgcgtgcgtcagatcggcgaaatcacgactgcgcttcggcggcacatcgtcgatatgcggggcgggcttattgactgcaggggagtgagacactgttgacttgctccatacgtgagattggcttcaggtgggtcatatcgccccactgcattcgataatacgccctgagggtggctacgaaatacgcggccaccctcagggcgtatggttttggtacttatttgacagcttcggttcagcggtcgaaatctaccagtttgctggcgacgccggtatatgttgccggagtcagcgccttcagacgagccgtggtagcgtcatcgaacgcctgctgatcgatgaactgctcgacggcttccttggagatctcatggccgcgcataagctccttgaccttctcgtacggcttgtccatgcccggcaggccggcaagttcgcaggcgcgcatggcggtctggatcggctcgccaagcacctcccagttggagtccagctcggcttcgatggcgatgtcgttcggatggatggagttcagaccgcccatcagattgttgagcgcgagcacggagtagcccaacgcggagccgatgttgcgttgcgtggtggaatcggtcagatcgcgctgccaacgggattcgaccagcgttgcggacagcgtgtcgagcagcgagcaggagatctccagattggcttccgcgttttcgaaacgaatcggattgaccttgtgcggcatggtggaggatccggtagcacccttgactggaacctgggcgaacacgccacgggagatgtacatccacacatccacgcacaggttgtgcagaatgcggttggtgtggctgatggtgccatacagttcggcctgccaatcatgcgattcgatctgagtggtgagcggattccacgtcagacccatgcggttggtgacgaattcgcgggagacggccacccaatcgacatccgggcatgcggccaaatgcgcgccgaacgtgccggtagcgccattgatcttgccgagatattcctgagccctgaccttgttcagctggcggttcagacggtacacgtacactgcgagttccttgccaagcgtggtcggtgtagcaggctggccgtgcgttaacgacagcatggccttgtcacggtattcctcagccttctgagccaaatggtcgacgatggcctgagcgcccggcagccacacattctcgatgccgtttttcacgcagcgggcgatggacaggttgttgatgtcttcggacgtgcatgcgaaatgtaccaaagtcttcaggccggtcagctgggtgtcgtggccaagcacgtcggcggccttgtcgagctggtcgtcgatgtagtattccacggccttcacatcatgatgggtctttgcctcatgggcggcgtgttgcgcgataccctcggcgccgaactcctcaggaatggcgcgcaggaacgcctgttcctcatcggtgagcggcttgacgccgggaacgatggtctggttgccgttgccctcgaaaccgttggccagcagaatcatccattcgacttcgacgcgcatgcgctcgcggttcaacgcaggttcgctcaaatattcgacaagcggagcggtctgctgatggtagcggccgtcaagaggggtcaatgcgattgcaggggagatatcagtaagcttcatagactacagcatacgttcagccgtaaacgagagttgcgtatctgtccgctcggtggatggctttcatgatgtatgccgtgataccgttcttgtcgcgccgtggctgcagtgttttttcatttgctcatgcgcccttcgaaatacatgacttcctgcagatcgccgtcgatgatctcatcgaaatgccgttcgtgggtgttcactgcggtggatcccatgtccgttgcgttctggtatgcggcttggtgatatttgagccaatgcgtgatttccttgttgtctggagcgtccgtgacgggagtgcctgcgaacgttgattcctggttgctgctggatttgcttgcggtgccgcgtacggtcagccaatggtcggaactggggttggcggcgccatcgagggctgccacgagctcgtcgtccatttccacgctggtcacccatgttttttccggaatcggatgattggcgacgggcgacccggcggtaaccacatgttcgatgtcataatcgtctttcaggtccgaggcgatggtggcggcaacgatgccaccttgcgaatgtccgatcaatgcgacgggctcattggatttgatgccggcctgtttcatggcttcctgcaccattcgcgcactgtccgcttccatgcgttgcttgctgtccgaactcatgagttcgacgttttgcggccacccaaatggagaatcgtgcttgccgtctgtgcctggaatggtgacgagccatgagttggttccgtcggatttacggtatttggagatggcgatggtgccgtagtcaagtccgctgtcgagatcggtcttgccgagacgttcctcggcaagacgtcgaagatcctccatggcctctccgacattatgcgattcacgcaccacttcggttttcggatggacttgggtgacggtgagattgttgccctggatcaggttgtaaccgcgcgacgatgccttggagatggtgccggctgcatggttgacctcatcggtacgcagcaggcctttggccttgccgtatccgctgaccgcggcgccggccgcgctcatgatgccttcctgcgcccaatccaacgagtccagcagatatatgggattggatttgccctcattggtggatcccatcacatatcccaaggcggacatggctgcgccggcgagtatcgattccttcgggaacgatgtgatcgccacttgcagcagttcgttcagtgttcttctgccagcgtcgtcgacctgggaatataacgattgcgcgcgaatgatcagcgccgatagctcagacaatcttgccgccatggctcccagcgcgcttgcatgggcgtcacattgttcgacgagctggtcgtatggcagttcgatgtgatccgtggcattgcaataggggcttgatccggacagcgaggcgatggccgacgacgcataggggtaggaggaaagctgaaggctcaatgcccggactgaatcatgggcgcggttcagagcgtcggcttgatggctgagggcttttgccgcgcgcatatatgcctcggtttcctccgtggagtatttgcatccgccgctgactttggcggtcacttcccagctcatgccgtacctactgcccataggagacgcaaggtggcgttgatcgaatcccgtagcgtcagggattgcttgcgtaactcatcaagccgcgcgcggtatgattcggcggcggttcctgtccaatcgggcaatgaactggatgcgagcgtggcgtcaagatcgtcaagatgtttcgatatggacgtgagcttggcattgacgagcagttgggtggttcgcacgccagcacggcaatggcatggcatgcctggcgttgaggccaaggtgttgatgaggttgaaccccagtccgggaataaacggataggtgattgatgcgttcataactatattggagcacatcgggcggttgcccaagccggcgaacaaggcttgtggtcggaggacgggcgaaaagcacgatgtcggcgtgtcatcgttgaaaaatcaacaaaaacacgccgacatgcctgtggataactttctgaaataagcccccttaccagggttttgcgggcgaagatgtttggttggaatcctgcttggccgccgaaccggaatcatcggaatcggattgggcggactgtgcgttctgggccagaagctcctccaccttctgacgctgctcgtcagtcaaggttcctccgttgccttggcctccatcggtgacggattgcccaccttcgatggctgtgtcggcctcggtgccgtcggcatgctgcatctctccgattttcttgcgtatggattcggtcagttttgccgaaacttcggcattatgctcgatggatgtgcgtacgtttggcagcagcaacatgccggccgcgccagcttcacggaattgcgcgtcggtctgctgctgttgggtctgcaatttgtcgaaatcggcgttttgctgttggctggctttgatattcgcattcagactgtccgtggcctggttgtagttgctgacggatgcgagattcactatgccaagcacgcccacaataaccgatatggctgcgatgacggcgatggcgatgcgaacgggcagcgatgcacgcgctgtaacggttgtgctcacagcagcctccttgattgcgtgatccatgccccggcctcgaacgtcagcagcagcgctacggcaatggcgaacggccagaccatggcgacggttcttgtgcgttgcttggatgtctgtgtgacacgccatttgctggatgcctctttggaatccccgccactcatggtcgtcgtggcattgagctggatggcggttccactgagctcgtcggcgatagcgttcatttcgtcggcattcatacgggacacgccaggctcgccggtttccggatcggtgacccattgcgtgtcgccttcctccacgccatcgccggtcacggggatattgcctccctgctcgctgcccacggcgacggtgaacgcatcggaaaggtagcgtcgcaacgatgagaacgttcggcgtgttttcgacgaggtctgctcgccatccgaaatcaggtacagcacgatcgcatcatcgggatgctgatcgtgaatcgacttgcatgtgagcaacaactggtcaatcggcacatccaaggtcgaaccggccgaaatggaagtcgattccggtgcaagcgtgtccgcccaattatcgatcgccttcgaatcaggcgtcaacggaacatccaacgttcccgaagcgccgaatcgcaatgccgcgaaactggaattcggatacatggcggcaatatccttcaccgcctgcttggcaacatccaagcggctgagctgttcgtcggaaccatactgcgcgtccgcgaccgccatggaaccggtcacatctaccgccaccaccacatcggtggtgttaatcgcacggctgttcgtggacgagacgatgcttggcgtcaatgccatgatggccaccagcgcacaaatcatcgatcgtcttgcgcaagcccagacggtttcatcgctttggctgcgtctacggatatgaagcacaatctgcgcgactgcgcaaaccagcatgatcacgcagatcgccgtgcctaaaggccatcccaaagcaggggagagcgtcagattggtcatcgcctcaacctccaagccaagagcagccaaatcactatcgccactgccaatgccagcgtccaccatcccggtgcgtccgatattgcggccttgctgcttgccgcgctgtcatggttgcgccgcgattcgatttgcttgaccagctcagccacggaagcgccgttcgattgcgtgagaaacacgccgccatgcgattcgatttcggattcgaactgtttggtcatctgttccgattcgctttgctgcggtccggagaacagtccgtccacggtgatttccgcctgtttggtcaggtcaagagcctcctgaagcgtgtatgtcggatctccggaaacgacattgtcggtggcgagcacaatggaagcggcacgttgacgggatgcggtctcggcgttggaactgccgtaggcgaaacctggcagcatggctgcgcaactcaccacgccgtcgccgatcagggaagtggcctctttacgattctgcgtaccttccagccagtcggaaatcgcttggtaatcgctgtctttcatcttgtcgatatcatcctgcgattcgacgcctttcagtatcgtgctggtcttgtcgagctgttcggacaccaattcgtaatcgtcggtcaacggaaacacggtacgtgacgtggaattgaaaatgctcaatccgatgcgctcgcccttgaaattgtccaccaatgtgcggtaggtatcgatcacttcgcggtcgtatggcaacgtcgaaccagatacgtccaagcacagcacgatatcgcggctgcttgcacgctcctctccctcatccacggtgctggggcgtgccaccagcgctatcgccagcaccagtgccatcaccaacagaacgacggcggcacgtgacatggtgcgccactgccgaaataatctcgatgcggtttcggtgttgagatcgtcatccaaactgaacgtccgcacggatcctgagtcgttatgcctgcgttttgcggacgccaataccatgatggcgatgacggccaatgacgcaatcaggcctgcaaggcctacccacggccagtgccatgacaattccattcatcgccacctttccacaagattggcaacccactctccagcctgttcaaccgtggcctctctggccgtgtgattgcgttcggcatccgcgaattccggcggatacaatgcctcgatggtctgcctgagcagggtgagcccatgctggttgccggtcgtgcgaggtgtcgcttcaatatcggtgagcgtctgattgcgtacgtcgctgccggtggccgtggagacgaaatctctggcgatcgatgcgagcagggcgaacgcttcctctcttccgagatcgccgttggcatgacggtccaccacatcgttgatgcgttcatgccatatcgacgtgcccgtcgatgcgtcgtgacgtccgcgattggttttcttcgttggcttgagagttggtttcgacagccataccaccaagacgacaagtgccacggcaaggatgaggcataccgcgacaacgatgcccagccccgtttcgatatgaatcgggtccagtgtgtcgaaatcgttgcgagacaaggcgatgtgattcatgctttgcctcccaaggtgagtgaggacggtgctttgagctgattgcgtgtggagcgagatagggatgcggataccattcgtacgaattcccggaacatacgttcgcttgaatcggcacggatcactgtggaaccgcaacgattcagctcatgtctgatggacgcggacagatattcgcgatgcgtgcgaacctcctgcgccgttttgccggtgcgcaggaatgccggaatgcggcggtcgctgcccgcgtcgaatacgtcgcgcgcatggctattgtcgaacggattaatggttgcgacatcgatgagcaccatcggatgggtccttgcgatcctgcaaatggactccacgtgacgttccttaagtgcgtgctcatcggtggcgatcaccaccaacgcatccctgtcgcgaatgcgacgggcgtactccagcaaagcgtcgatattgcgaggtttgttccaatcacgctgcagcgcattgtccaacgtctgttcgaattgcgtaagtccgccattgaatggcacacgggtgatcgagcctgaatcgccgaatactatggacacttcgtcaccacgacgcaggctgagcgccgcgaacatgcatagggcgttggctgcgacctgatgaacctgttcgccggaaacgcaggtaccggtcatttcctgtccgacatcgagcaaaagccaggcgcgtgaagtggatgggcgttcgcgctgcaccaccatggggcggcccacacgggcgctggtcttccaatcaatccgttttgcctcgtctccaggctcatagatgcggatatccatgacatcgtcggcgccgaaacgcttgtctgatgcgtgcgcaccctcaagaataccgagcgccttgcgaacagtcggcaggctcaacgtggttccgagggcttcgatcttactgcggatcggatcttcggaacgaattgcgtcgatcatggaacgggaaccgcctgaacgatcgagtccacgacctgatcgctggtgacgccgtcggcaagggcctcgaacgtgagcaggatgcggtggcgaagcacttcatgtgtgaaggctttgacgtcttctggaatcacatagtcgcggccttgcatcaacgcgttggcctgtccgatgcgagtcagcgcgatggacgcgcgtggcgaggctccgagacgcactagtgtggacaatccctgcaccggcttggtgccggctcctcgggatgtggcagtgatatcgaccgcgtatttcatgattgcgtcggacacatgcacgcgacgggccgcggcgcgcaggaattcgacatcgctgatggacacgacgtcaccagtgagcgttcgtgaatcaaaagtgtcggagccgcggtgggtgagcatggtgagcatgcgctgttcctcctgcgcggtcggatacgtcatgacggctttcatcatgaaacggtccatttgcgcctcaggaaggttgaacgtgccttcctcctcgattggattctgtgtagcgatgaccatgaacggtttcggcagtgcgatgcactggccgccgatggtggtggctccttcggccatggcttcaagcatggccgattgggtttttgcgtttgaacggttgatttcgtcgagcagcacgaagttggcgtggatcgggccgatctgcgtggagaacttctgcgtcgcgaaatcgaagacctgggtgcccaccagatcggatggcatcagatcaggcgtgcattgcactcgcttgaacgatccggacacggaagtcgccagcgtctgcgcggccgtggtcttggccagacccggtacggattcgatgagaatatgtccgcctgccaccagcgtggtgatcagcgattcacgcaggttgtcctgtccaactagggtctgcgcgaagcgtgcgcggatgcacgtgccgagctgtttcgcccggttgatgtcctctgggggcaacgtgctcggtttggtgacggccggcattggaacgggggttggtgtcggtaccggattcttcggagggaataaagccatagttgctactgtaacgggtcaagctgacgggagggaccagtccacaggcttctcgcctgcggcgatgagcgcttggttggcgcgggaaaacggttttgaaccgaagaatccgtatcgcgcggacataggactcggatgaggtgaggcgataatatatgcgttggtgagcagcggtcccagcgtctgcgccttgcgcccccacaggatggcgaccaagggtttgatgctgccatcgggattgcggcggttgttaagcgctttgatcgccgcgtcggtaacgatctcccaccccttgtcctgatggctgccgggcttgcccgcttcgacggtcaggcatctgttgagcagcataacgccttgattcgtccaaggcgtcagatcgccgttcgtgggcatgggtacgccgaggtcatccgtcagctccttgtatatattggtcagactacgaggaatgggctggacatcgggcgccacgcagaagctcagtcccaccggatgaccgggggttgggtaggggtcttggcccacgataagcaccttgatgctgtcgaatgggatggtgaaggcgcgcagaatgttcgcgctggcgggaagataccggcgtccggctgcgatttcgcctcgaaggaaatcgcccatgcggtgcacctgtggctcgacctcggcgagggcattcgcccatccgggctccacgagatctttcaacggcttgatgttcgattgtgtcatgcaccttactgtacgacgtgttgcggtcctgatgacaggggtggtttggttttcacgggatggtttcacgaacgttcggaataggggtgggaatgcggctcgattgtgttctgactgaggtggtcggtacacttggcagataagtgtgtgagaaacgaggtttgcaatatggctaagcaggacaaggagacctacgattcctacgagaaggatgtgtacgacaatcctccggcgggacctatgggtgttcaccgtggcgcgcgttccgcggcgtcccgggccatgccgtacgtcattgtcatcattgtggcgctgcttgctggtttgctgttctggagcatttattcaggtgagatcaacaatctgaagatgccgtggtcgtcgcaggagagttcgactacttcaagtgccgaaaagagcaagagcggcaagagcaagtccaagtcccaatccgactccgcttccggcaataagacagacgcatccaatgccgattcgccgaccgactcgcagcaaaatgatcagaacgccgaccagaatgccggccagaatgccgagcagacggataacgccactgcgcagcaggctgtgaacacgggtactgaggttcgcgtcgtgaacgcgacgaatatcaccggttatgcgcaaagcaaggccgacgtgctgacccaagccgggtataccagtgtttctgccagcaatccgacgggaaacgttccttcgcagaccgtggtctggtatcagaacgagaccgataaggcgaccgccgaaaacgtcgcacagacgctgggaatttcgaatgtgcagcaaagcgatggactcgtcacgccaatcgttgtggtgttgcttgactgaaaaacgccgtgagcgaaacaaaaaagccttgttcttttccccaagaacaaggcttttttgttttccttggaattccaacgttgatggcttatttagacgaacaattcttcttgcttacagcgcaactggcgacatggagtttggcactctcggcctgagagtgctaatctgccaattagcactcgaggagcgagagtgataactggcagctgacggctggtgcgttcttcgcttcgaaggtgggaataataccgtgtagccatatgtggaggaacaatggcaaagatcattgcatacgacgacgaagctcgtcaaggaatgctcgcgggcctcgacaagctcgctgataccgtcaaggtcaccctcggtccgaagggccgcaacgtggtcctcgacaagacctacggcgctccgaccatcaccaacgatggtgtctccatcgccaaggaaatcgacctggacgacccgtacgagcgcatcggcgccgaactggtcaaggaagtcgccaagaagaccgatgacgtcgctggcgacggcaccaccaccgcaaccgtgctcgcccagtccctggtgcacgaaggcctgaagaacgtcaccgccggctccaacccgatcgctttgcgtcgtggtatcgagaaggcttccgaagccatcgtcaaggagcttatcgcagctgccaaggacgttgagaccaaggatcagatcgctgctaccgcaacgatttccgccgccgatccggaagtcggcgagaagatcgccgaagctcttgacaaggttggccaggacggcgtcgtgaccgttgaggacaacaaccgcttcggcctggatctggacttcaccgaaggcatgcgtttcgacaagggctatatcgctccgtacttcgtgaccaacgccgaagatcagaccgcagtgctcgaagagccgtacatcctgctgacctccggcaaggtgagctctcagcaggacgtcgtgcacatcgccgagctggtcatgaagaccggcaagccgctgctgatcatcgctgaagacgttgatggcgaggctctgccgaccttgattctgaacaacatccgcggcaccttcaagtcctgcgccgtcaaggctccgggcttcggcgatcgccgtaaggccatgctgcaggatatggccatcctgaccggcgcccaggttgtgtccgacgaactcggcctcaagctcgactccgtcgacatgtccgtgctcggcaccgccaagaaggtcatcgtctccaaggacgagaccaccatcgtggccggcggcggctccaaggaagacgtggctgcccgcgtggctcagatccgtgccgaaatcgccaacaccgattcagactacgatcgtgagaagctgcaggagcgtctggctaagctggctggcggcgttgccgtcatcaaggttggcgctgccaccgaagtcgaggccaaggaacgcaagcaccgcatcgaagatgccgtgcgcaacgccaaggccgccatcgaagaaggcctgctgccgggcggcggtgtcgctctggtccaggctgcagccaaggccgagagcgatgtcaagctcgaaggcgacgaggcaaccggtgccgcgatcgtgttccgcgccatcgaagccccgatcaagcagatcgccgaaaatgctggactgtccggcgacgtggtgatcgacaaggttcgttccctgcctgacggccagggcctgaacgcagccaccaacgagtatgaggacctgctggccgccggcgtcaccgacccggtcaaggtcacccgttccgctctgcagaacgcagcttccatcgctggtctgttcttgaccaccgaggctgttgtggccaacaagccggaaccgccggcagccgctccggccgctggcgctgacatgggctactgatccaacggtttggcaaagcctgacggcataagcaaaaagctataagtggagtccgtttcccatagtggacgcgggctccactttttgtttgcgccagctattgctttgattgcgtcggaagtacctgccgctactgcgcaaacagacgcgatgcctgcatttcggtttccgcatacagtgcggatgcctgcgtcagcgcatgctgaatcgattcgagcgactgctccatctgctgttggacggcacgccattgttccgccaccgcattgaactgtgtggccgctccgcccctccagacgctctgcagattgttgagattggcgtacatgccctgcaccgactgacgtatcgcttggatggaggcgtttaccgccgcgctcgaggattgaatctgctcgctgtccacctgaaactgtgccatgatgatcctttcgttgccaggtacttttgtgtgctcggttggtaccgttcgctcgcacttgacgtatctgaacggtaatgtggactgtatggcaacagtgaacgcgatgaatgaaaaaaccagggttgtggtcggaggatgtgcgaaaatgtgcccaatcggtgtgtcgcgacaacggcaaaacttcagaaatcgttggaatgtagcggcttgcatgcttctttctatgctgttgtgttgtgcgatgatgttgtggataactcccgtcggcagcgcggaagacaatacgggcaccggaatcacggccacggaaaatatcaccgacactgagaatctgctcggatcaaacgtcgccgagatcacggatgccatcagcgcgacaaagcaggaaacgggcgtcaccgtgcatttgctgtacctggcaagtttcaacaccgaagaaaaacctgcaaaatgggcgagcgcgctgttggaatcgcttgatccgaaaccgaatacggttttgctggcggtcgcttcgaacgatggcaatctcgtggttgccgtttcgtcgaattccgacgaatggttgaagaagaagtcgacggtcgatgcgctttccgatgctgcgcagaaacctttgatggaaagcactccggattggtcgaaatccgcaaccgatatgatggatcagattgcggtgcagaagaagacctcgacgtcgtcgcagaccgtgctgttgggtgttggcggcatgatagccgtgctggtgctgctgattgtgattatggtggtgttccatattctgcgcaagcgtggcatcatcaagcgcaaggtgcgcaagcatgcgggaaggcatgccgcgattactgtgcgttccgagccggtgaaggcgtggagtgtcgatggtgagctgtccgttgaagcgcatgatggagggcagacgtcaaaggaagactcagaatccgttcaggaaacatccagtgaacagagtgatgcttaaagcatgagcaagcctattgaagcatccattgtcgttgttgacgacgaaccgtccatccgtgagctgttggtggcatccttgcattttgcgggttttgaagtgaataccgcggcttcgggatctgaagccatcgaagtcatcgagaaaatacagcctgatttgattgtgcttgatgtgatgcttccggatatcgacggtttcacggtgacccgtcgtatccgtcaggaaggcatcactacgccggtgctgtatttgacggctcgcgatgatactcaagacaaggtcatgggtttgaccgtggggggtgacgactatgtgaccaagccgttcagtcttgaggaggtcgttgcgcgaatccgtgccattctgcgccgtacccaggagcaggttgaggatgatccgattatccgcgtcgcggatctggagatcaatgaggattcgcatgatgtgtcccgtgccggacagccgatcgatttgagccccaccgaatacaagttgctgcgttatttgatggataacgaggggcgtgtgctctcgaaggcgcagattttggatcatgtgtggcagtacgattggggcggggacgccgcgattgttgaatcgtacatttcatatctgcgcaagaaggtcgacggacttacggtggaggatgagaacggcgagaagcgcaaggtggctccgcttatcgaaacgaagcgtggcatcggctacatgattcgtgcgccgaagaactaaacggtcccgcgatgagtcaggatacccgtcagccgtcggctgacccgcagaacacgcagaagaacggcggccagccgcgtccgcaacgtgtgccttggcatcggcggatcggcaggaaggtgcaggccattccgttaagcaccaagctggtcacttgcatcattgtgttgttgaccattggcactatcggcatttccttttccattcgcacgcttgtgggcaattatctgctacagaaaaccgacacgcagttggtgaatcaggcgcagatgattttcaatagcatggattcgctggacagcaccacgagcgaggatggacggagcttggtgaacacgtattatgtcgaggtgcgggacagcgaatacaagcgtaccggcgctgggtcggtgcctatgctccgtgagggcgtggtgtccgagccgagtctgccttccgacggcagtatcgacggggtcacgctcggagagccgttcaccacacaggcggtggtgcacgttaccaccagcagggtgccggatcacgccatcatgcaggccgcacagtcgccgtggcgtgttgtggcgctgccttggagcgagaaaaccaaaacggggcaggtcaaagacagcggcgtcgtgttcatcggattgtcgctgagtgaccagatcgacacgtccaacacgttgacgcggttctgtgccatggtcggcatcgcggtggtgttgatcggcgccattcttggcaccatcgtcgtgcaaagcacgcttgctccgctgaaacgtatcgagaagaccgctgcgaagattgcggcaggggatttgagccaacgtgttcccgatttgccggaaaatacggaagtcggatcgctgtccatgtcgctgaacaccatgctgacgcgtattgaggaaagcttccacgcgcaggaggaaacgaccgagaagatgaaacggttcgtttccgatgccagccatgagctgcgtactccgcttgccgcgattcacggatatgcggagttgtacaaaatgcagcgtgacatgcccggagcattggaacgtgccgatgagtccattgaacatatagaagcgtccagtgcgcgtatgacggtgcttgtcgaggatttgctgtcattggcgcggttggatgaaggacgtggcatcgatatcacccagcaggtgaagctgacttccgtggtcaatgatgcggctgatgatctgcacgcgctcgacccggatcgtggcatcacctgcggccaggtggtattgcaggcgggatcggatatggaacatccttcgcgtctcgccttccagccgggaaccatgccggacatcacgttgaccggcgatgcatcacgcttgcgtcaggtggtcacgaacattgtgggcaacatccatcggtacacgccggccgattccccggttgaagtgtccatgggcgtgcttccggcgtccatcagcccggaatcattgtctcgcatgccatccaacgagcagtcgttgcatcactttatcgaggccatcgaggtggggcaatccatgcaagtcggcatgaattacgcaattgtgcgattcagcgatcatggtcccggcgttcccgcagatgcacgctcgaagatcttcgaacggttctacacggcggatccgtccagagcacgacagaagggcggtacgggtctcggcatggcgatcgcccagtccgtggtcaaggcacaccatggtttcatctgcgcttccggcagtgacgggactggattgacactgacggtagtgcttccggtggctcctgtggaaccacgtccgttggcgcagaccagtgacgaacgcaaggtcgacaagcgtgggcgcaggccgaaaaaacaatgatgcaaacatgcaaaaaggcatgatttgacgattgttggcgcaagagatggttacatatcccacctcttgcgctaaactgtatctttgatttgtaatcggcggacgattgttctttcgttcgcctgaaggtatgtggattacgtaagagtgaggtgacaatgcctagcggacgcgttcgttggttcgatgcgaacaaaggctatggttttattcagaacgagcagggtgccgatgtgttcctgcctgcagccgccctgccggagggcgtgaagacgttgcgtaagggtgcaaaagtcgagtattccgtggtggagggccgccgtggtccgcaggcaatgggcctcacccttgtggcatccgcgccgtctctggtcaaagcaactcgaccgaagccggatgatatggccgccattgtggaggatcttatcaagttgctggattccgcggggaaccagttgcgccgccaccattatccatctccggctgaaagcaagaaactggccacgctgatgcgtgccgtggccgataacttcgacgtacaggaataattcatgtccgataccacaatggatcccaaggcgatcgcccaggcggtggccatcgaagtcgccgatgaggatggccaagtcggtgacttcgtcgaagccatcgacttgggagacaacgttactgattttcgttttgaaacctgcatacgtgggtatgagggatggcagtggtcggtgacgttgtatcgcgatgctgagttggaccattggacggtcaatgagtcatcgctggtgcctaccgacaaggcgttgcgcccaccggaatggattccatggaaggatcgtcttgaaccgaccgatttggcggtgaccgattcgatcggcaccgatcccgatgatccacgtatggaagaggggttccgcagaactgagcccgttgagtctgccgaaagcgtttccgacgatgtgcagaccgtcgaagcggcggacggcggcgacaatgccggagcggacgctgacgtggttgacggttcgcaagacgagaatgccgtagcatcggtgacctccgaagaggacatcgacgaggcggttgaggaattcgatctgtcccgcaggcacgtgctcacgcctttgggccgttcccagaccgcgaaacgctggtatgagggaccgcgcggaccgaaatcgttgtccaccaaaacatcggatggcaatccatgctcgacgtgcggattcttcattcctctgaaaggcgaactgaatcttctgttcggcgtgtgcgctaacaagtggagtcctgatgacggtcgtgttgtatccatcgaccatggctgtggcgaacattccgaaatcgagccgccggaaccgtctcacttgtgggtgcagtcgaaacctgcatttgacgacctgcatatcgatatcatcgcgcaggcgccgcgtgatgaacgcggttccgtcgaactgatcgagcagctgtcggtgaatgaagacggcaatccgaacgatgaggaagaagcctccgaagccgatatcgaagccaataccgtggatgatgatgcgaatcaggaggaagtgctcgaacatacggcccagcaggatgagccggaggtggaatccaccgttgatttgagcgatgacgaagagccggttatcgtcgaatccgaagaggatgaagcgacggatgcggaacccaccgaagccgaggaaacggacactgcagaggaaaacgctccggaagctgagtaatcctgtcttatcgaggatatgaaagaagtccgttccctatgtaaggaagcggacttctttcatatcctcaaaggtttagtgcacgacagtgacggtgcagtcggcgaaattgacgatttgcttggagacggaaccaaggaaatgcgcgtccaagccggacaatccacgggaaccgaccactagatggcgtgcgtaacgggatgccgcgatcagccccttcgcagcggaaatatggaaggcgtgcgattcgatctggaaatcgtcgggaatgccggcagtgggaatctcaaccgaatcgagcagctcgtcaagaatgcgttccgcccgttcctgaccgacggcaatcggcgctatggcgttctcatatccctcgatgacgccaagatccttgagctgccagcagaacatcacctgcaggggagcgtgatgcaaagccgccaggtcgatagcgaatcgcaaggcgtgtcgcgaggtttccgaaccatcgacgccaaccacgatcggccgctggttcttaggcagaggggagccgggcaaatcgtacgtcaccgtgttctccgaaggcgtaagcgcgttggcgatggcatcctgcacgctggattcctcgtcgtcgagaatgcgaactatggtaacgggaacctgtgcggcttcggcaagcgattccgaaagcgagccgaggaaccagcgtgccactctgccgagtgaacggcgtccgactacgatctgctgcgcatccttgccgatctccagcaatgcggacgttcctgtggccttgaccgacgtgagtttgacatgatcctcattgatggtcatgccctgcgaagctttggaaacccagtcgcgaagccgttgcgcgatctcatggcggacttcggcccactgctcttcatcttccggttccgagcccatatcccaggaatgggaccatgcgaacaccgcattgacctgctggccggtaagcgatgcctcgttcagcgcccagcgtaatgcggcgaaggattcgtcggaaccgtcgacgccgacgacgatgtcgtgcaagcggatatctgcgagcatcccggattcggttgcatttagggtggtgtcgctcatcttggtgacctccttggtcgttgctatatgtcaagcatatccgttgcgttgcgtcgagagcgcaatttacgcgcggatgaaaacaaacgtcatcgcgaatcggtagagtgttgatggactaacaagagtggaaggacaagcatgttcgaacggtttaccgaccgtgcgcggcgcgtgatcgtgctggcgcaggaagaggctcgtaccctccagcacaactacatcggtaccgagcatctgctgcttggcctgattcgtgagggtgacggcgtcgcagccaaggcgctggcctcaaagggtgtgaccttggatgacacccgcaaacaggtcgaagagatgatcggtaaggggaatgccacgccgaacggccacattcccttcaccccgcatgccaggcaggtgttggagctgtcgctgcgtgaggcgttgcagctggggcacagctatatcggcaccgagcatatcctgctcggtctgattcatgaaggcgaaggcgtcggcacccaggtgctgatcaagatggacgtcaatcttggcgagctgcgcagcgccaccatcgacctgatccgtggcaattccggtgatggcaagggtgatggcaagggcgatttggccaatgccggtggcgtgcaggatcgtcgcaaccagaccggttccgcgattcttgaccagttcggccgcaatctgaccgctgaagctgccgccggcaagcttgatccggtgattgggcgttcgagtgagatcgagcgtgtgatggtggtgctgagccgccgtaccaagaacaatccggtgctaatcggcgagccgggtgtcggcaagacggccgtggtcgaaggcttggcgcagaagatcaatgccggcgacgttccggagacgctgaagggcaagcaagtctattcgttggatctgggatccatggtggctggctcgcggtatcgtggcgatttcgaggagcgtctgaagaaggtgctcaaggagatcaagacccgcggcgacatcgtgctgttcatcgatgagatccacaccattgtgggcgctggttccgcagatggcgctcttggcgcttccgacatgttgaagccaatgctcgcgcgaggtgagctgcagaccattggcgccaccaccaccgacgagtaccgtaagtacatcgagaaggatgccgctttggaacgtcgtttccagcccatccaggtgcatgagccgagcattgccgaaaccatcgagatccttaagggcttgcgttcgcgttacgagaaccatcaccatgtgacgatcaccgatggtgcgttgcaggccgcggccgatctgtcgagccgttacattcaggaccgtcatctgccagacaaggccatcgatctgatcgatgaggccggtgcgcgtctgcgcatccgtcgtctgaccgctccgccggagcttaaggaacttgacacgaagatcgccaagcttgccgaagagaaggaccaggccatcaagggccaggacttcgaaaaggccgctgagctgcgtgataagcaggagaagctggaagccgaacgcaagcagaaggaatcttcgtggcgtgagggcgaatccgatgtgaagatggttgtggatgaggatgtcatcgccgaagtgatttcccagaccaccggcattccggtgttcaagctcacccaggccgagtccaagaagctcatgaccatggaaagtgagttgcacaagcgcatcatcggccaggacgaggccgtgtccgcgttgagccgctccatccgtcgtgctcgtgttggtttgaaggatccgaagcgtccgtccggttcgtttatcttcgctggccccaccggcgtcggtaagaccgagctggccaagacgctcgccgaattcctgtttgacgacgaggacgcactgattcgtgtcgacatgtctgaattctccgagaaatatgcggcttcgcgcctgtttggtgctcctccgggatacgtcggttacgaagagggcggcgaactcaccgagaaggttcgtcgcaagccgttctccgtggtgctgttcgatgagatcgaaaaggcccatccggatatcttcaacacgctgctgcaggtgcttgatgacggtcatctgactgatggccagggccgcaaggtggacttcaagaacaccatcatcattctgaccaccaatcttggtacgcgagacatcgccaaggccgccaacaccggcttcaacttgggtgccaacaccgagtcgagctaccagcgcatgaaggatcaggtttccgcggagctgaagcagcagttccgtccggaattcctgaaccgtctggacgacatcatcgtgttcaagcagctcaccgagccgcaggtgcgtcagatcgtcgatcttgacgtcaagcagctcaatgatcgcttgttcgatcgccacatgtccctcgagcttaccgacgctgccaaggatctgctcgcgcagaagggcttcgacccgctgctgggcgcgcgtccgttgcgtcgcgtgattcagcgcgacgtcgaagacgccatttcggagaagatcctgatgggcgaactcgaagatggccagcgcgtgaaggtcgatgcggaaggcgaaggcatcctgggcgagttcacctttaccggtgaggcgttcgaagagccaaatacggagcctgctgaaggtgaagtcgcagctgaaaccgaggcacctgccgaatcgacggaatcgacggaacttacggaatccgcagaatctgttgaataagcaatcggtgcgtaagtaacgcgacacacgaaaggccttgaaatcgtatgtaatgatttcaaggcctttcgtatgccgaaagtatttcgaaacttgacgaattacagtgtcagcagatcgagatcggcagtgattgacgtgttacgggtgaacagtgtgcgaccctctcgtaccgagcgaagcacttcgcaacgctcgtatacggcgtcgaacacgctggaagcatcaagcacaatgaagtttgcgggcttgcctgcctcaagaccatacgaatcgcgcatgccgagcgtggttgcgccgttgactgtcaggaacttcaacgcatcatcgatctcttcaaaactcatcatctgtgccaaatgcagcacataatcgagaatcagcatcatattgccgttaccgaccggataccagggatcttgcatggaatcctgaccaagcgacacattcaccccagcttcggtgagctccttgactcgcgtgatgccacgacgcttcgggaacgtgtcttgacgcccctgcagatacagattttccgtaggtgcgcaggcgaaattgatatgtgcggccttcaacagcttggtcagatggaagaaataggcattgtcggccgatcccaaggagcaagtgtggcttgccgtggtcttcgaaccgataccggcgcgataggcgagtgcggacagcagttcaagataacgtgagtttggatcgtcggtttcgtcgcaatgcacgtcgatgagcttgtcgtacttcgaagccagttcgaccacggtgtgcatggaacgttcgccgaactcacggcactgctcgaaatgcggaatgccaccgacgcaatcagcacccattttcaggccttcctcaaccaaatccgcgccggattcgccatgaggaccttcataggagtacatgccctcctgcgggaaggagacgatctgcagcgtgacagtatctttcagttcctccttaagctccagcagagctttgagcgaggtaagattcgggtcggtcacatcggcgtgcgaacgaatgaactgcacgccatgacgcatttccttggcgatgccgattttcgcgcgttccttgatctcgtcgacagtgagatctgccttggtttcactccaacgctgaatgccttcgaacagggtgcctgactcgttcaccgcgccgggcttgcgtgcggtaaagacgtaatcaagatgcagatgggtgtcgcagaatggtggacagaccagctttccgcccaaatcgacgacttccacgctcgccatatctttgccttgtgcttcgagtgttgctttgagatggggtgcaatgctgatgaacttgccgtcttcgacgagaatatcttggattgccgctgtttcggctgcggtgctgcccggcatgccggtggcgatgtgtgcgttgatgaacagttgcgtgctcataatcactccttccaatacgagttttcatgcgagttttcgggttccggcagacgttttgtcatatgtccattgggttacggaagggaacctttgacgtaatcgttgatggttattgtcggcgtattgctttgcggtcacgttacttgatgtgacatgtgtattacttcggattggacggtttgtatggctgttacggtgagggaagtgctcgatgatgccttggttgcgacggcggaaccacaggttgaagttgctggcgatagcttggataatccggtgcgttgggtgttcaccaacgaacgcgaggacgtcgcctcatttctggcaggaggcgagcttctggtggtggaggggcgatctttagttgcggacggtcgtgaaaaacgtgcggacgaatatgtgaaaagcctcgtgaatgctgatattgcggcattgatggtcgaattggttgaagaagtcacccaactgccgaaaatgttggtgaaggcagccaagcatgaaggacttacgattattggattgcgcagtcgcattcctttcgtcgatatctgccagagcgtcaataccatgattgtgcgtgatcagatgcgtatgcagatgcaagtggacgttatgtcaacttcgttgcgttctgagcttgctcaagcgtccaatcccaaagccgttgccgatggcattgcgaacctgttcggcgaggatgtggtcatattcgacgtggacggtcttgaagtcgcccgagccggacagaacatcaataccgctacagattgcggcattgtacttgcactggaggaacagaaacggcctttgggtgctttggagatcagccagcgcaatacggtgttcgatgaagcgatgtgcagaaggatcgaacagattgccgctccggttttgacactgtatctcgatgggggagcgcgcgtcggcatggtggcgcatctgattgcggggccggaagatggcgtgcatgtttcgtcgatggaagcgcgtgagggccatgccatgcttgatgcgttgggattcgccgcttcgggcgtgtatatgccatttgccatgaaactcaagtcggtggccaacgccatgccggcaatcgtgtcgatgatcgacgatttcgaatccaacggcggttgcgaatcgatctgtttgttggaaggcgatttaatgatcggttttctcgcggcgcaagacagcggcggcgatgtgtcggtattttcagatcggtgtttgcatgcgttgacgcaagtcgctgcaaacgaatacgtatataccgtgcatggacgcgcagcgttggacacgatttcattgatggacgcgttcggtgcgttgcgcagtgtgattcgaacatgcatttcgaacgatgcggaatgcccgtatggaaccctcgaatgtgtggattcctcgttgctggaacgcatgttgggaatggaacgtaccgatgaggccgtgcgcatggtgatcacgcagacggttgggcatgagcttatgcataacgccatgctgatcgacacgttgtgcgcctgtttcgacaatctcgacaacaagaccggcgcatgcgagcaattaggtatccaacggcagacgttgtacaaccgattggacaaagtgacacagatcgtgggcatagcgcctaccgataaaatcagctggtcaatgctgcttttaggtgcgaaaatggcgaaatcgcaacataatcacaccatatcttccacttcggcgctgtaagcaaggggaacttggcaaaacgtcaaaaacaaacggttgcggtttaacaatcagttcactttggcgcaaatacttcgggcgatagtcagagtcacaacgttcgccgggtatgaagaaaacgcgaacgtacagacagattcagcagaagaaagcaggtgacatgatgagtgccagtgcaacaatcgcaaccgccaacagggcttccgtgtctgaacagtccgaagagcagaagatggtcaagaaagtggccgtctcgtctttcctcggcaacttcattgaatggttcgactacgcttcctattcctacttcgcgaccaccatcgctttggtgtttttcccgtccggcaatcacacggtcgccatgctgcagacgttcggcgtgtttgcactgtcattcgtgcttcgtccgatcggtgcactgttttggggtaacttcggcgataagaagggacgcaagggcgctcttgcgatttccatcatgttcatgtcgggtgcatcgttcctgattggctgcctgccgtcatatgctgcgatcggcattttcgctccggcactgttgctgctgcttcgcatggtgcagggcttctccgcttccggtgaatatgccggcgccgcaaccttccttggcgaatacgcgccgaccaagaagcgtggcatctactgctcgctgattccggcatccaccgccatcggtctgctcgcaggctccacgctcgccaccgtgatgaccgcttcgctgagctctgacgcactgacctcttggggatggcgtattccgttcctcatggccggcccgcttggtctgatcgtgcatttcatccgtaccaagctcgctgattcgccggtgtatgcttccatgaccgaagctttggacgacaagcagcagtctgcttccaccactaagagcgtctccccgctgcacgagctgttccagaaccacttcaagactctgatcatcagcttcggtgcctgcgcgctcaacgcggtcggtttctacacagtgctcacctacctgccgacctatctgagtgacacggttggcgtggttgacgcacagtcgtccaccatcaccaccatctgcttggtactgtatgtggctttggtgttcggcatgggtcacatctccgacatgctcggacgcaagaaggtgctgattggtgcatgcgtggccttcatcgtgctcaccgttccggccttcatggtgctgaacaccgcgcagttctggccggtgctgatcgttgagctcgccatgtgcgccaccctgaccgccaacgacggtacgctttcgagctacctgactgaaaccttcccgacatcggttcgtttcaccggcttcgcattcagcttcaaccttgccaacgccatcttcggtggaaccgcgccgttcatcgcaacctggctgatctacaccaccggttcgagcatcgctccggcctggtacatggtggcggtgtccgccgtggcactggtcgccatgatcctctctcacgaaaacacggataaggatctgagccgcatctgagaagaaacagttttacgaaacaattcctcgaaacaataaacgccgtccctgaaacatcgattgcaacatcgattcgcggggacggcatcatcgcaatcattatcaatcgttgaaacgcaaaccaacaacagcacataaaggagcaatcatgagcagcagccgtcggatggaccatatgacctggccggaaatcgaagcatcgaaatcaaagccggttattgtgccaatcggctccaccgaacagcatagccagcatcttccccttggtgtggacgccatgatcgccagccatgtgtctgaagacctcgccgaacgcatcgacggcatcgtggcaccgaccatgaactacgggtacaagtcgaagccgctttccggaggcggcccattgttccccggcaccatcgacatgaacggtgcgacggtgatcaatcaaatgcatgatgtgcttggcgagctgatcgcggacggtttcaccaaaatcgtggtgatgaacgcgcatttcgaaaacgaggcattcattatcgaggcaatcgatctgatcacacgcgaaaccaggggagtggccaccatcgtcgaaaccaactggtgggatccgctgccggagaacgtggtcgagcaggtgttcgacggactcgtgttccccggctgggcgttggaacatgccgcagtgacggaaacctcattgatgatgcattacgagccggaattggtgcatatggaccgtgtgatcgacgaaggcaatgttacaccgaaggcttacgtgcgctacccggtgcgcaagggcgacgttccggattacggaggactggtcactcctgcaggttccagcgccgaacgaggcaagctcatcgtcgatgcctgcattgatgcggtggccgatatttgtgctaccgaattcggcgaatgatagttgaatattctgtatggcgactgcgcatgtgagaacacgcgcgatcacacgaagaaggctggtatgtgacggatgtcgttacgtaccagccttcttgattatgcctgagtgaagtccagctgatatttgaccgcatctctgtggtgcaaccaaatatcaggatttgcgacttacttgatggcgttcagccactgttccttggtggccttctcggattcgagcttggccttcttcttcggatcggattccgcggcgatcttctgatcaagctcagcgagctgagcgttgagctgttcttcgaaggaggacttgcgggcgtcggcttccggatcggactgcttccaagcggcatcctcaatggctttgatctgcttgtctacagcatcgagacggccttcgatgcggcgcacttcgtcacgcggcacgtaaccgatctggtcccactcctcctgaatggcggcgagagcctgacgggcctgcttggcctcttcttcgctcttgacgggaaccagcgcctcggccttgaccagcagctcttccttcttggcaagattttccttctcggaggagctgatctgatcacgatcggcctgacgtgcgttgaagaaggtgtctgcggcggcgcggaaacgctcccacatggcatcatcgtcacgacgaccggcacgaccggccttcttccaacgatccatcagctcggtgaacttgcgggaggtttcaacccaagcggtggaatcctgcagcgcctcggcctcggcgatgatggcttccttggcggacttggcggaattacgctcttcgtcacggttctgcacccacttgcggcgggcgaaattgaacttggtgcgggccgcggagaaacgagcccacagggcgtccgcatcttccttgtcgatgcggacgttgttgcgctgatgctcctgccactgctggaagagcgaacggaacttgtctgcggtggaacgccagttggtgttctcgtcgagggaatcagccagcgcctcggccttctccacaatggcggtacgctcctcgacggccttggcgatagcggccttgcgtgcttccgacagctcggtcttcttggccacgccttcttccttcagagcctcgaactgagccttaagagcggccagatcacccaccactgccggctgttcggtttccgcggacagcgtcttgatggtctcgtcgatttcgcgggacttcacattgttggacttgagcttgttcgcgaacaggtccaacttggccttcaaatcaaggtaacggcgggcatacagagccagcgcctcttccttggaggcatcagggaactgaccgacctcacgttctccttcgccgtccttgacgaacacagtaccatcgtcggcgacacggccgaatgcttcggcggtcttcacatcggcatcggagaagccggtggatgcggcagccggagcggtgtgctgtggagctttcttggcgaaggccgcggggctcggagcatggggcttcatcgaagccgggctcggaacggccggtttgctggccttgactgcgggcgtcgttgcctgctcggtggtttcattggtgttctcggacgcggtgacattctcgtcggccatggccagctcctttaagtaagcttcatgtagtgcaggggatgcggatcgtgcgaacgtgctttcaaagcctgaaaaacgcgctgcattttccgcaacctcatttattatagggaatcgtggcaaaaggcgcatctatttcaggatttccagagtggctcccctctgaacgtgttgtggagcagcgtgttatcgacacgctccgtgaagttttcgagctcaatggcttcattggcattgaaactcgtgctgttgagcagggttcgagtctgctcaagaagggcgaaaccagcaaggaaatttacctgctgagccgccttcaggaggtcggtcatgagtccgacactccgattgaggaccgccttggtctgcacttcgatttgactgttccgctgagccgttatgtggtcgaacattccggcgatttggcatttcctttcaagcgttggcagattcagaaggtctggcgtggcgaacgcccgcaggaaggtcgtttccgcgagttcgtgcaggccgatatcgatgtgatcggcaacggtgatctgcccgatcattacgaggtcgagctgccgctggtcatggtatcggcattggaacgtctgcgtgagttcggtttgccgaaggccaccgtgcatgcgaacaaccgtaagctttctgaaggtttctaccgtggtcttggcctgaccgatgtcgagggcgtgctccgtgagatcgataagctcgacaagatcggtgccgacgaagtggccaagttgctggtcgaaggctgtggagccgacgagaatcaggcgcgtgcgtgccttgagttggctgaactgaccgcagctgacggcgctgaactgtccggcaagttcgacacgctgtgcgagaagcatggcattgccaatgattccgaggcgtacgtgctcgcacgtcagggtcttgacacgttggcgatgattgttgacgaggccgctcgtattcgcccgggctccgtgatcgctgatttgaagatcgcgcgtggtctggattactacaccggttccgtgtatgagacgttccttgacggtgctgcggctcttggttccatctgttccggcggtcgttatgacaatctcgcatcgcagggcaacaggaagtatccgggcgtgggtctgtccattggcctgtcccgcttggtttcgtacatgctgcacaccgccggtgcccacgcgaatcgcgtgtccccggcttccgtgctcgtggccgtgtggaacgaggaggaccgttccgcttccaaccaaatcgccaaccagctgcgcgcccgtggcattgcggcagatgtggctccgaccgcagccaagcttggcaagcagatcaagtatgccgacaagctcggcatcccatacgtgtggttccccgcggacaagtccgcgcaggacgcttcggacgaagtcaagaacatcatcacgggcgaccagcagccggccaacgcacagtcttgggagccggatactgtgtatgcccagcaaaccgttaccgtagaagcctgaaatcgcaagacttcaatcattagagaacaaggaataggggaagcatgagccagacggcttatagaacacatcatgcaaccgaagtgaccgaggaactcgtcggtcagaaggtgacgctctccggttgggtcgatcgtcgtcgtgaccacggtggcgtggccttcatcgatcttcgtgacaacaccggtcttgtgcaggtagttatctacgacgaagacatggcacgtccgctgcgctccgagtttgtgattcaggtggtgggcgaggtccgcctgcgtccggacggtaacgagaatgatcatctggccaccggcaagatcgaggttgtggcggaaaacatcgaggtgctcgccaagtctgacgcgctgccgttccaggtgtccaccgcgttggaaaacgagtccgagaacaagctgccgggcgaggaagttcgcctcaagtaccgttatctcgacctgcgccgcccgtccatgcagcgcaatctgaagctgcgttcccagatgtcgaaggctgctcgccacgctctggaagagatgggcttcgaagaggtcgaaaccccgaccatgatcaagtccactccggaaggcgctcgcgattttgtggtgccggcccgcttggtgccaggttcttggtacgcgttgccgcagtccccgcagcttctcaagcagctgctgatggtttccggcgtggaacgctactaccagctggcccgctgctaccgtgacgaggatttccgtgcagatcgtcagccggagttcacccagctcgatatggaaatggcgttcgtggatcaggaagacgtgatggccatggccgaaaaggtcatcgccgccatctggaagtccgcaggctatgagatccagctgccgattcagcgcatcacttggcaggaagccatggataagtacggctccgacaagccggatctgcgtttcggcaacccgctgatcgagctgaccgactacttcaagaacactccgttccgcgtgttccaggctccgtacgttggtgcggtgctcttcaagggtggtgcggccacgcctcgtcgccagttcgacgcttggcaggattgggccaagcagcgcggcgccaagggcctcgcctacgtggtgttcgctgagaacggcgagctcaagggacctgttgccaagaacctgtctgaagaggagcgcgctggcctgaaggaagccgttggcgcagaagacggcgatgccgtgttcttcgcagcaggccgtcgcacctccgctcaggagctgctgggtgccgtgcgtgtggaactcgccgatcgcgccggtctgctcaagccggacgacttcgctttcacttgggttgtggacttcccgctgttcaagcccaccgacgatccggatgacgacgatgtggcagtcggccactccaagtggacctccatgcaccatccgttcaccatgccgtccaaggattggatcgacaccttcgacaaggatccggaacacgccatgtctgattcctacgacatcgtgtgcaacggtaacgaaatgggcggcggttccgtgcgtatccaccgtgatgacattcaggatcgtgtgctcgatgtgctcggcatcactcctgaagaggctgccgacaagttcggcttcctgcttgaagccttcaagtacggcgctccgccgcacgctggcatcgctctcggttgggatcgtaccgccgccatcctggctggcgccgactccatccgcgacgtcatcgccttcccgaaggctggcggcggtcgtgatccgctgaccggcgccccggctccgatttccgacgaacagcgtgcggaaaccggcgttgattatgatccggaagaagacgaagactgatagtgttttcgctgtgagatgacaggctgtctttgcatgagagaccgtgcaaggacagcctgtttttattgtttacgctgtctattttctcttgctgccggtatggtggagcaaagatgagtatctgaaatattatgagaaagaactgaatctgtagtatgaatttgaagcaatcgttggaaaaacatgattttcatggtgcttggatgcgtcttctcgcatgtgcgatgacgctgattatggtggtggccggatttgctgcggctccggccagtgccaatgctgccgaaatcggagatccctccgcagtcaagggcaaaacctacgcggtcggcaccgataccacattcgcaccgttcgaatatcgcgagaacggcaagatgaccggtatcgatatggaactgatccgtgccatcgcccaagaagaaggattcgaagtcaccatccaatcattgggtttcaatgcagcattgcaggctttgagctccaatcaggtggatgtggtgatcgcaggcatgtcaatcaccgacgaacgcaaggcgacctacgatttttccaatccttacttccagtccggtatccagatggccatcgctgaaaacaacgatagtattaccagctacaaggatcttgacggtaagaccgttgtcgcgaaaaccggatcggaaggcgaatcctacgccaaacagcatgcaagcgaatacggctataccgtgacttccgtggaccagtcatcaaccatgtacgagatggtcaaatccggcaatgcggatgccgtgttcgacgactatccggtgcttgcctacggtgtttcccaaaacaacggtttgaagatcgtgactccgaaggtgccgcatggtgaatacggcatggccgtgaacaaaggcaagaacgccgatctgctggccgccatcgacgatggtctgaacaagctcatcgcttcgggcgagtatgagacgattgtcgcacagtatttgggtgccgatggcgcgaaggaacaggtcgaggcgatttccggcaaggtcaccgacaacggtgccgacggtgaggcgcagaagaaggtcggtttctttggtctggtcaaacagtcgatgccggctttgctgactggtctgaagaacacgctgttgatcacgttgctgtcgtttgtgatcgcactggcgttgggtgttgctttcggcttgatgaaagtatcggagaacaagattctgagaggcgtgtccaaggtttatatcgcagtgttccgcggcactccgattctggtgtgggcgttcttcttctatttcggtgtgccgcagcttatcggacacagtgtgaacatttgggttgcaggtgcgttgacgctgtcgctcaattccggcgcatatctggcggaaatcgtgcgtggcgccgtgcagtccgttgactctggtcagatggagggagcacgctcgcttggcctcaaccatcatcaggccatggcgcgcgtgatcatgcctcaggccactgcaatcgccatgccgtcgatcatcaaccagctggtcattatgatcaaggattcctcactgctactggccatcggcttcggtgaattgctgtaccaggcgcagcaattgtatgcggcgaacttccgcgtcaccgaaacgttgctgatcgtcggtgtgatgtacttcgtggccatcaccatcctcacatggctggccaatatcgttgacaggaaggtgaatcgatgagcgagaactgcaatcacggcaacaatgatggcgaagtgatcatcgacgtcaagaatctgcataaaaactatggtcatatggaagtcatcaaaggcgtcgatcttacggtacgcaagggcgaggtgatctgtatcatcggaccgtctggtgccggcaaatccaccatgttgcgttgcctgaacggacttgaacaggcatccagcggccagatcgtggtcaacggtcatgatctgggtgatccgcatgtgaacatcgaccaggttcgagagcaggttggcatggtgttccagcatttcaacctgttcaacaacatgagcgtgattgacaacatcacgcttgcgccgaaactggtgcacaaggaaaccgacgagcaggcgcgtgaacatgcgatggcattgctgaaaaccgtgggattgggcgaaaaggccgatgtcatgcctcgctcgttgtctggcggtcaaaagcagcgtgttgccatcgcacgatccttggccatgcgtccgaaggtcatgctgttcgacgaggccacgtcggcgcttgacccggagatggtcggtgatgtgctcgaagtcattcgtgagctggccgaagacggcatgaccatggtgctggtgacccacgagatgggtttcgcccgcgaagtggccacccgcgtgatcttcaccgacgccggcgtgatcgaggaggaaggcactccggacgagatcttcaaccatccaaagagcgaacgattgaagacgttcctttccaaagtgctctgagtgctctcttggctccggcgattgcttaatcgctgatcgcggatgaaatgctgcgatcgtgtgacggatggtcatacgcatctgcatataaaagacaggcgaatgtagggtgaaattcatcttgcgttcgcctgttcggctctttctcgttgcttggcgttcctacgttggtatgcatgagcattggtgatatgtggcgtcgcgttgtggatggtttcaaatccaaggtgcccgaacgagtggtgttcggtgccgtggcggtattgttcgtaatagcggtgctggctatcgaattgccacgatggtggtagctgccatgtacggcgcgtaagatatcggtattgcggtcgataacgcgttatgatgcattttgagacaacgttgtctcatatttcgagcacgtcagggggtggtgacggctgcggaaacattgcttccatatactatccgtatgacagatatcaaagaaacgcaagagacgcgcccgatcatgccgggtgcggaagacagcggccgcccgctggtcgaattgacccacgttgaaaagcactacggtgatttgcatgtgctcaaggacatcaacctcaccgtcaagaagggcgaggtgctggtcatcgtcggtccgtccggctccggcaaatccaccatgtgccgcaccatcaaccgtttggaaaccattgattccggtgatattcgcattgatggaaagccattgccccaggaaggcaaagagctcgccagcctgcgtgccgaggtcggcatggtgttccagtcgttcaacctgttcgccaacaagaccattcttgagaatgtgacgctcgcgccgatcaaggtgcgccacatggataagaaggcggccgaggatctcgccatggacctgctctcccgagtgggcgtggcttcacaggcttccaagatgccatcgcagctttccggcggtcagcagcagcgtgtcgccatcgcccgagcgctcgccatgcagccgaaggtcatgctgttcgacgaaccgacgtccgcgcttgatccggaaatggtcaacgaagtgcttgacgtcatggtggagctggctcacgaaggcatgaccatgctgtgcgtgacccacgagatgggcttcgcgcgcaaggtggccgacaaggtcgtgttcatggccgacggccagattcttgagcagagcacgccggaagacttcttcgaaaacccgaagaccgatcgtgccaaggacttcctgtcgaagattctcacccactgaaatgactgacgggaataagacagaagaaggattttcgatatgaaactttctatgagggtgaagcgtatgctgcgcagggttatagcgaccttctgcgcatgcgcatgcgtgttcgcagtgtccgcctgcggcgcggacgatgccgatggcaagattcgcatcggtatcaaattcgatcagcctggtctgggcttcaaaaagtccggcacgtatgtcggcttcgacgttgacgtagccaagtacatcgccaagaaactcggctattccgaagaccagatcgtgtggaaggaagcaccgtcgaagcagcgtgaagccatgctgcagaatggcgatgtcgatttcatcgttgcgacgtattccatcactgacgaacgtaagaaggttgtttccttcgcgggaccgtacttcgttgcgggtcaggatctgctcgtacgtaaggatgaaacctccatcaagggacctgaggatctgaacggcaagcgtctgtgctccgtgaccggttccacttccgcggttaccgtcaaggagaagttcgccaacgaggtgcagctcatggagcagccgggttacgcggaatgcgcgaccgcactgttctctggcattgttgatgcggtgaccaccgacgacattattttggctggtcttgcctccgcgtcccgcggccgtctgcgcgtggtcggcaagccgttcacccaggagtattacggcgtcggcatcaagaagggcgatacgaagctggccacccagatcaacaacgccatcgccgatatgatccaggatggttcttggcagcgtgccatttccgacaacacgaagggcaccgcatacacgccgaacgcgaagtacaatccgccggagccgactgagggggagagataatggaagcgttcatctcattgttcagccagtacaatgtgccggctgcgttcttggtgaacattgaactaaccctgtggtcggcgttgttctccacgattcttggcgtcatcctcgtgatgatgcgcatctcgccggtcgcgtcgctgcgtatggtctcgggtgcttacgtcgagctgttcaagaacctgccgttgaccatcatcatggtgttcatggtgctgggtgcctacgcgcagctgaagctcagcttctccgacacgttcgccaccaacttcttctggcttgccgtcaccggtttgagcctgtatacggcggccttcgtgtgcgaatcgctgcgatccggcatcaacaccgtgccgcttggccaggctgaagcctgccgtgcgctgggattgaacttcatgcagtccgccacccaggtcattctgcctcaggcgttccgtggctccgtggcaccgctgggcaacacgttgatcgcattgctgaagaattccacggttgcggccgcggcttccgtcgccaccgaaacctcgtcgttgatgagcgaaatgatcgaataccgttccgacgtgattgttccgatcttcctgatcttcgcattcggttatgtgattctgatcattccgatcggcatgctgaccacgtatctgtccaacaagctcgcggtgaggaggtgacgcaccatggcaagcgatgaaagcgcggtgttgttcgaccagcccggtcctaagacccgtaaaaccattcgtatcgtcaactggattgccggcattgtcttcgcaatcgtagttgtgctcattctcatgaggcttcacaatccgccggatggcgagaaccagctgagctgggagttgtggaagccggcgcttgacgctgaggcatggaccgatttctatctgcctggattgtgggccacgattcgagcttccgtgttggcagtgatcggcgcagtgctgttcggtctgattttcggtatcggccgtctgctgccgaatatcgtgattcgtgcgatttccggcgccattgttgagttcgcacgtgcggtccctgtgctgctgctgatgatcttcttctggcgttggttcgctttcgcaggcatgtcaagccccgcatactgggctgtggtgctcgcattggtgatctacaacggttccgtggtggccgagctggttcgttccggtgtcggcaacctgccgaacggccagcgtgaggcgtcgctcgccttgggcttgacccgcacgcagtcgctgatggaaatcgaagtgccacaggccatctacgccatgcttcctgccgccgtgacgcagttggtggtggtactgaaggataccgctctcggctcgatcatcatgtacaccgatttgctgcaggaatcgcgtcgacttggttcgatgtacttcaatattctgcagacattggttgtggctgccgtcatctacttcatcgcatgctggctgctgagccgtcttgcggaatggctgccggaacgcatgcagaagcacactgcggcacctgccgaaccggaaccggtcgctccgatcgccattatggatccgtcgaacgtgaaccaaatcgccgtggctagggaaggtgtgccgcttggcggtgcccagcgcctgtaccatgtgcaccatcgtggttccaacgcgtcgattcgccattggcgtcagacccgctatgttcagggattcgatgagacgcatccggaaagccaagtcgagttcgataagaacggcaggccgatcaaagatacgtccaagcaggacaagctgagattcgacaagccgaagtcagacaaatcaaagggtgataagcccaagcagtgacgtcatttgatctgagaagaccgatagggcgctggtttcttgcaaagagcgaggaatcagcgccctattgcgtgaaagaagtcaggcaaaacgtcagaaaagcgggatgcggcgattgggtgcggcgatgccacggttcaatcgccgcatcgtctatcataggggacaagcgaggaggcttgacatgtcagacaaagacaaggatgcgaagacgtcgtccattgcgaagacgttgaacaaggttgaggacaggcttgagaagggggagaactgcagttccgttgccgaagggcttgcgaatgttgccaaggccagcgagttgctcagttccgtgtggacgcttccgcccagtcagttattgcgattccatcatgatacgagggtcgctgcaatcgatggcgattccacgccgggtttcgacggcaacaaagatgatgcggaacggttcattgcgatcagttcttctgaaatcgcacgatatcagcggcttatgtacgccaatggagtgaaaggttcccgccgtcgtctgttgattattctgcagggcatggatgcttccggcaaaggcggcatcgtgcgtcacgtattcagccagggcgatccgatgggcatgcattatcacggtttcggtgctcccacaggcgaggaaaaagaccatgattatttgtggcgcatcaaacgggaactgcctcagaatggttggatctccattttcgatagatcgcaatatgaagatatcgtcatgccacgcatttacaaaacatatccggaggaggtatggcaggcacgatatgacgaaatcaaccgattcgaatcgcaattggtcgcggacggatgctccatcatcaaaatattccttgtggtgagcaaagaggagcagaaggagcatttcctcggcaggctggaggatccgaccaaatattggaagttcgaccccagcgaccttgaagcgcgtgcccgttggaacgactacatggccgcatggcaggacgtgttcgcgcgtacgagcaccgagcaggcaccctggtacctggtgcctgccgacaatcgttggtattcaagggcggttgtgtctgaactgctccgtaacgtattgaagaacatgaacatgatctggccgcccctggaagtcgacgccgacgagatgcgacgtcagttggaaacgctgtagtcgaagaacacgacttcgccgctcgactgtgtggtgtccaaatcgacggttccggtgatggcccaatcatggtcgccatcggaatcgtcgatgatctgacgcaccttccaactgtgctcgctgttctccttggaatcgtcgaggatgaacagttcgctgctacgggccttcgcatccgtgttgacgtattcgtgctcgtcgtagaagtcgtcgagcgcatcctcccattcgtgaacgccataaccccagtctttgtcaagcgcgccgagcttgtcgggtttgtcgagatccatgagctgcacgcggcggaacatggcgttgcgcacgagcacggtgaggcctcgacgatcctccaccacggcctgcttcgcgccgggcgcggccaggttcgcggcggcttcggaagcgtcggtgccggctcccgcgttctcccattcgtcgaccagcgaggagtcgatggaacgaaccacaacgcgcagccaagagatgatgtcccgtaactgttcgttgcgcttctccaaaggaacggtacgcgccagcgcgcgatatgcgtcagacagatagcgcagcagcgtgccttcggagcgggcgatattgtagcgtgcgatgtaaccggtgaaatcggaggccgtttcgaccatgtcccggatcaccgatttcgggctcaaccaataatcattggcccaaggcacatcgtgacggtattcgtcgaacgcagcctgaagcatgtcttccaatggtttcggatacgtgatctcctgcaagcggtccatacgttcgtcatagtcaagaccgtcttccttcatgcggatcatcgccgcgtcgcgggcttgacgttcctgcgcgcgcaacacctgcttcggattctccaacgtggcttccaccatggaaatcacgtcaagcgcatagttctccgattccggatcaagcagttccaacgcggccagcaggaacgggctcaacggctggtcaagcgcgaaatcatccggcatgtcgacggtcatgaaatagtccttgccgccatcatcgcggtcttccgtttcgatcacattcgtatcgaacaaggtctggaagatctcgtcggcacgatcatgaagatgctccttctgttccggagtctgcgccgaatcgtcgataagacgatcgatacggtaacgtgcatcgccaccctgttcgacttcgttcaacaccatggaatgcgtgaccttcatatgcggcaccaatgtttcgggagtcgcgtcgatcagcttgtcgaacgtgttctcattccacgtgacgaaaccttcaggcgccttcttacgcttgactttcttgagcttcttcgggtcgttgcccgctttggcgagggccttggcgttctcgatctcgaattccggaccctcggcgatgaccaagccctccgtgtcgaagcccatacggcctgcacgccccgcgatctgatggaattcgcgggcgcgcagcttgcgcatcttcgtgccatcgaacttggtcaatgcggtcaacaccacggaatgaatgggcacattgatgccgacacccaacgtgtcggtgccgcagatcaccggaagaagaccctgctgggcgagttgctcgaccagacggcgatagcggggaagcatgcccgcatggtgaatacccacgccggtacgcagcagacgctgcagaatcttaccgaacgccgtggtgaacttcgtgcccttgatcgcctccgcaatggccgcacgttgctccttgctggacactcccgtgctcgccagagcgttcgccgtctccaatgcggcatcctgagagaaatgcaccacatagatcggcgtttcccctctgccgaaggccaattcgacggttttctccaacgggtcaagcgtgtactcgtacgtcaacggtaccggacgcggcgcatcggcgatgatgtcgacgtccgtgtccgtcatgtcctccaatttgtcggcaatcgcatcgacgttgcccaatgtggcgctcatcagcaaaaactgcgtgttcggcaatgtcagcagcggaacctgccaagcccaaccacgctccgaatcgccataataatggaattcgtccatcgccacacagccgacatcggcatgacggccctcacgcaatgcctggttcgcaagaatctccgcagtgcagcagatgatcggcgcatcggcgttgatgtgcgtgtctccggtgatcatgccgacgttctcacgaccgaacacctccaccaaatcaaagaatttctcagacaccaacgccttgatcggagccgtgtaatacgagcgacggcccgtgcacaacgcagcgaaatgcatacccaacgccaccagtgatttgccggagccggtgggcgtgttcaaaatgacatgatcgcccgcgagcaggtccatgatggcctcttcctgatggggccacggctcaacacctttgacgtccgccacccactcgaaaaagcgttcgtagatctcgtccgtgtcgatgttgcgctcgccatcgctccaattcggcgccaaggcgcccaaagaaccgtaattcgtatcgtcagccatgattgccagtctagcggctggcatgaactcaaatgtcgaacgtgtgttcgaattattgcgtatgttgcggtacagtagaaattatgactgaggatttgtttggtgcgatggacgctcccgaagatatgacacgcccgctggccgtgcgcatgcgtccgtcgagcgtggacgaagtggtgggccaatcgcgggtgctgggacagggctctcctctgcgcagactcgccaatccggcgtccaaaggctcgctgaccgcgccgagctccattattctgtttggacctcccggcgtcggcaagactacgctcgcctatattgtggccaaacagtccggtcgagtcttcgaagagctttccgcagtcacctccggcgtcaaggacgtgcgagatgtactcagacgcgcccatgatcgtcttgtcgcggagggcaaggaaacggtactgttcatcgacgaagtgcaccgattctccaaatcgcagcaggatgcattgctgccaagcgtggaaaaccgtgacgtcactttcattgcggccaccacggaaaatccgagcttttccatcatcaaaccgttgttaagccgatccgtggtcgtcaaactcgaatcgctggaacccgacgacctgaaaacgctcatcaacagggccatcgaaagcgagcgtggacttaaaaacgaagtcaaaatcaacgacgaagccgttgacgaaatcgtgcgtatggccggaggcgacgcgcgaaaaacactgacgatccttgaagccgccgcgggggcgcttaccggagaccaagcacgcaaaaaaggtacgaaacggccaatcatcactcccgacgtggtatcgcaggtcatggacgtggccaccgtgcgctatgacaaagacggcgacgaccattacgatgtgatttccgcattcatcaaatccatgcgtggatccgacccggacgccaccatgcactacttggcacggatgttgcgcgccggcgaggatccgcgattcatcgcacggcgcattatgatcgcagcttccgaggaagtcggtatggcggctccgcagatactgcaggtcaccgtcgcggcggcacaagccgtgtccatgatcggcatgcccgaggcgcgcatcattctcgcggaagccgcgctcgccgttgccaccgcgccaaaatcgaacgccggctacaacgccatcaacagcgcgctcgccgatgtggacgcgggattgatcggtcaggtacccttgcacctaaggaatgcgccgaccgccctgatgaaaagttggggcaatcatgaggggtatcggtacgctcatgattggccgggagccgtggctccgcagcaatacatgccggacgagctggcagggcgggaatactaccatccgaacgatcgcggctacgagcatgagatcaaaccgagactggagaaaattcgcaaaatcctgcatgagaagaacggtgataggggctgatcgtttcttcccgccgctgacgagttcacccatatccgtgtacaatgctgacctagtgaacgttaacatacgttcgtgctcaacgtggagggcgagtctgggcaaacttggacgcagtgttgaagggaatgacgaagcaatgcgaaatatgcaggatgagtctaatcaacgattgatcatgatcgtcgacgacgatcaggctttgggcgagatgctatccatcgtattggagagcgaaggatttaaaaccgtgacctgcttggatgggtggcgtgcggtggaaatgttcccgacattgcagccggatttgatgttgcttgatgtgatgctccccggtttggatggcgtccaggtggcgcaacgcatacggcagaactcgaatacgccgatcatcatgcttaccgccaaatccgacaccaccgatgtggtgaaaggcctggaagcgggggcggatgattatgtgtccaaaccgttcgaggtggtggagcttatggccagaatcagggctcggctgcgcatgcccaaggtaaacgcgcctgcaggcaaggatgagggcgacctgactgaacgattgcaatgcggcacgctcgtaatggatagggctgagcataccgccaccaaagatggtgtggatctgcagctgacgccgacggagtttgaattgctgtacgtgctggcggctcacgcgggtgaagccctgagccgtgcgaacttgctgaaacgtgtttggggatacgaaagtggcggagataccagattggtcaacgtgcatgtgcaacggctgcgcatgaaggtggagaccgatccggagaatccgcggatcgtgcagaccgtgcgcgggatcggatacaagttcgtagccccgacggtataagcgaaccatgctgatgagaacccatcgagtgtggtgtatctggcatcgtgacagacagcaggtgcgccgatcattgcaggcgagaacggtggccgtgtcgatgctggtggtgttgctgacggccgcgttgctgtctttgttttccatgtacgtcatcaggggatccgtgctgaagcaggcgacggatgactcgcgcagcgatttctcatcgcagattgtgcgcgtccagaagcatctgaatgcctcgaatctaactggaacggaccaataccagcagttagtgagcaatctggcgtccgaattgcaaagcaatggttcgagcaatctggtcggcgtgtacctgatggaacgtgatgcagcggattctgcggagcgtggattcgtgccggtatcgacggagccggaatattcaaatctggtgtcgtcatctatgcgcaaccgcatgcgtgctgatacgtccggattgatctactatcagccggtacgtattccgagaacttccggaggtacgcccggcgcggttttgggatcggtgatttcgtcgaataacatgggctcattggaagtgttcgcactgtactcctaccaatcgcagcagcaggcgctgagtcagatccagatcaacatgctgatggtgtgcgtggcgttgagcgtgttgatcgggatgatcatttttctggtcatgcgttcggttatcactccggtacggcgggtcgccttggctacggaaatcatggcatcgggaactttcgacgcccgcgtggcggtggacagggccgatgagataggcgtgctgcagaaatcgttcaatgaaatggccgaatcgttggagaatcagatcgaagagctggaaaaagccggggatatgcaacgcagcttcgtttcggacgtcagccatgaattgagaacaccggtgacgaccatgcgtatggccgccgacatgctgtcgatgcacaaagacgaatacgatgccaccacaaagagaacggtggaattgctggatggccagatccgcagatttcaggaaatgctcgccgatttgttggagatttcgcgtttcgacgccgggtatgcggcgcttgatttggtggaggccgatatacgcgagcccatcgaacagtcggttgaagcgatttccgccatcgcccagaccaaacatgtgccactggatgtgcatatgcccaacgtggaagtgcttgtgagaatcgatacgcgtcgtataagccgtgtcgtacgcaatcttctcgctaatgccatcgatttcgcggagggcaagccggttgaggtccgtcttgccgccaatcagcgaatggtagtaatcagcgtgcgcgattacggcgttggcatgacctcggaacagtgttccagaatgttcgaccggttctggagggcggatccttccagagcgcgcactaccggaggaaccggtttgggcatgtccatcgtactggctgacacgaaactgcatcatggtgatgttgcggtgcgatcgcggctgggtgaaggaacatggtttttggtgacgttgcctcgcaatccggacgatgtcgattgcggtatgaacaacgctccgattcgattcgcgaccgatggcgacgatatgcgggtggtcggaggctttggcgttgccgataacggattcgtggactatctgaccaataaacccatggtggaggggctgtgatgactgcgaaaaacattcgtcgtgtgattgccgcggtctcattagtggtattgctgggatgctccatgatgcatctggccggatgctcgagcatattgggacttcctgaagatggtccggtgcagaccatgaccccggaggaacaaagcacaagaagagtgttcacgtctcccgacgggccggccgatgacgcgcagccggaagccatcgtcaaaggatttttcgacgtcatgcctgcgggagtgcagagtgacgggttcgccacgggcaagcagttccttaccgatggcgccgcatcaaggtggaatgccgataaccggactacggtatatgccgacgtgccgaaattcgtgcgtaaggccagcacggtggagtcagggcaaggcgggcagaaaaccgtggtgagcgtcagcctccagatacaaggggaactggatgcgcatggcgtgtatacggcggtggcgagcggaggggcaaaaacctacgatttctccctctccaaagtgcgtggccaatggcggatcagcaaactgccgacaggcgtgatgatcagctcctacgatttcgagcaggtgtaccgtcaggtttcgctatatcagttgggctcttccgaaaaagaactgatccccgatgttcgttggctttgctggagggattggcggacgcgcgccgtgcaggaactgcttgccggaaatgcggcatggctggaaggcgcggtaagcgacaccaataccaagcggatcgtgttgcagcccgacggtgtgcagatgcgcgattcggtgatggaaatgagtctctcatcggcgatggaacgaatgacggatgccgaacgtggcattttggtcaggcagattcgcctatcgttgggggacggcagcgccgagacggaaatcaaggtgatgtctggaaaccatgactattcgcatgccgatgattcgtcgtctcttgatgcgcagactccgctgaatcccatgtatacgttgagcgtcggcaatatcatttcgttgaaatcctacagcgccattcgtgtggcgcaaacggatctttcggacgtgcgaagcttcgttttctcagaacagggcggagccgtgcttggtcgtgacggatatgtgaaaaggctcgcagaggacggttccacccatgcattgatgttttcaggacgcatgatgaaaaccatctgcaaaggaaacgactccgagatttggggcatcgacacatctggcaagcacatcatggtcgatgatgccggcacggttctcacccttgacgttcccggcctcgtatcagcacaaacgctccattccatgaggctttcccctgagggggaccgtatcgcattctccatcgaatcggatgggggatcgcagtcgggtgtggccatcatcgggatatgccgggaccatgatggctccgtggctgggctgtcccaagcgttcgctttggtttccacacagtccaatgtgtcgatgatgacgttctataacgacgtcacttttctctatgccacgcaatacgagcgggggcgtgcgcagatcggacgacgtcagatggtgcctggtcctgaaacgagtcaggcgctacccgacaatggtgcggtcgatatggccacaggagaagtcggcacatatcgcaggcttgtcgtactcgaccatctcggagtggcgagaacggtcgacggatcgttggatggtgcatggacgattgctgattcccaagttacgtcgttatctgtgcaatagtgaaaaagttgtaattccgccattgttatcgtttcgttattgacttgttatcgaaacgttattgctatggattgagaccttggattgttcgaacgatactgaaaacactgatggcaaggaagcccatcaatagaaatactcgaggaggagttttcatgaagaattggaagaaagctattgcgatttgtgcttcggcggcagctatggccagcatggcggcctgcggtggcggcagctccgatggcgattccagctccagcaagagcgataagaagaccatcggtttcgtggcagtcggtccggaaggcggcttccgtacggccaacgagaacgatctgaagaaggcattcgaggatgccggattcgatctggtgtactccccgacgcagaacaacgatcagcagaagcagattcaggcattcaacaagttcgtcaacgacgaagtcgacgcgatcgtgctatccgcaaccaacgattccggttgggatgactgcttggagaacgcggcggaagctgaaatcccggtcttcaccgtcgaccgcaacatcgatatcaagagcgatgcggcaaagaaggcagtcgtctcgcacatcggcccgtccaatgtctgggccggcgagcaggccgctgaattcgtcaacaagagcttcccagatggcgccaacggcttcattctggaaggaccggcaggcctgtccgtggtgaccgatcgtggcaccggttgggataacaaggcagcaagcaatatcaaggtgcttgagtcccagtccgccaactggtccaccgatgaggcaaagaccgtgacagcaggtctgctcgacaagtacaagtccgacaatccgcagttcatcttcgcccagaacgatgagatgggtctcggcgcggcacaggccgttgatgccgctggtctgaagggcaaggtcaagatcatcaccatcgatggcaccaaggccgctctgcagtctctggtcgacggcgatctttcctacgtcatcgagtacaacccgatcttcggtaaggaaaccgccaacgccgtcaaggattatctggatggcaagtctgttgaatccgatatcgagatcgaatccaagaccttcgatgcagacagcgccaaggaagccttggatgccggtacccgtgcgtactgatccgatcagataactttccgaatagcatctctccttttcacatagcccaagaacggtgcaccgcatagcgcgatgcaccgttcgttccatcttgggcaaatatcacaaaacgataacaattttcgtaaggcgaagacatggtagataagcaaccaatcgtcgtgatgaaaggtatcacgatcgagttcccgggcgtcaaggccctggacggcgtcgacctgcgtctgtatccaggtgaagtccacgctctcatgggcgagaacggcgctggaaaatcgacgatgatcaaagcgcttaccggcgtgtacaggatcaacgcggggtccattgaagtggaaggcaagccgcaaaccttcaccggtaccggtgatgcgcagaacgcgggcatcgccaccgtgtatcaggaagttaacctgtgcaccaatctcagcatcggcgaaaacgtcatgcttggtcatgaggtgcgagggacgctgggcatcaactggaagaaaacctatgaggaatcgaagaaattcctcgcccagatgggtctggatcatcttgatccgagagcaccgttgagctccatttccatcgccatgcagcagctggtcgccatcgcccgagccatggtgatcgatgccaaggtgctgattcttgacgaaccgacgtcatcgcttgacgccaacgaagtgcaggatctgttcaagatcatgcgcaagattcgtgattcgggtgtggcgatcctgttcgtgtcccacttccttgaccagatttacgagatcaccgatcgcctgaccgtgctccgcaacggtaagttcatcaaagaagtcatgaccaaggacactccgcgtgacgagctcatcggcatgatgatcggcaagagcgcggacgagctgagccagatcggcgccaagaaggcgcatcgtgacgtgactgaaggtgaacagcccatcgtctccgtcaagcagcttggtctgaaaggcaccatcaatcctacggacctagatatctacccaggccaggttgtcggcttcgcaggcctgttgggatccggacgaaccgaactcggccgactgctgtacggtgcggacaagccggattccggtacgtacgagctcaaaggcaagaagaccagtatctccgatccgtacacggcattgcgcaacaagatcgcatactccacggagaaccgtcgagacgaaggcattattggcgatctgacggtccgcgagaacattctgatcgccttgcaggcgacgagaggcatgttcaagccgattccgaagaaggaagccgacgagatcgtcgacaagtacatgaaggagctgaacgttcgtccgaacgatccgaacaagctcatcaagaacctgtccggcggcaaccagcagaaggtgctgatcgcacgttggctggccacgcatcccgacctgctcattctggacgagccgacgcgaggcatcgatatcggcgccaaggcggaaatccagcaggtggtgcttgatcttgccgctcagggcatgggtgtggtgttcatctcgtccgaaatggaagaggtggtcaggctttctgacgacatcgaagtgctgaaggatcgccacaagatcgccgaactcgtcaatgacaacacggtttcccaggaaaccatcgtccaaaccatcgcgaacacgaacgtcaatacaggaaaggaggcatgatgagcgacaagaaaacaaagcaggacggcgattccctcgtcaagaagctgctgtcgtcaaacctcacatggtctgtggtcgcactgattgtgctgatcgtcatctgcaccatctccgatcaccaattcctctcgttgagctggaataagaacaccggaggtctttcgggaccgctgatcaccatgctgcaggaatcggcgcgttatctcatgatcgccaccggcatgacattggtgatctccactgcaggcatcgacctttccgtaggttccgttatggcggttgccggtgcggcggccatgcagatgctgacttccggcgttaacgtgtggctggcgattttcctcgcactgctcatcggcctcggtgtcggctgcatcaacggcgcattggtttccattctgggactgcagccgttcatcaccacgctgatcatgatgctcgcaggtcgaggattggccaaggtcatcacttccggccagaacactgatgccagctccgttgcaggcggcgcgccgctgaaatggatggccaacggcttcattctgggcattcccgccaatttcgtcatcgcattggtcattgtcgcgctgattggcctgctgtgccgcaaaacggccatgggcatgatggtcgaatccgtcggcatcaatccggaagcctcccgcatgaccggcatcaagccgaagaagatcctcttcctcgtatacgcgatttccggtcttctggcagccgtggcaggcctgttcgccaccgcatccgtgatgcgcgtcgacgtggtcaagaccgggcaggatcttgaaatgtatgccatcctcgcagtcgttatcggcggaacctcgctgcttggcggcaagttctccctggctggcagcgcgcttggcgcggtgatcatcgccatgatccgcaagaccatcatcaccctcggtatcgattccgccgcaacaccggcattcttcgccgtcgtggtgatcgtgatctgcgtgatgcaggctccgaagattcataaccttggcgcggaaataaaacgtaagtgcgcgctgaagacgcaaactaaggcggtggcagcatgacttctgcaacagctactcaggtcaagaagaccgtgaaaccgactcggcgtcgtcttgacgctcagatgattccaaccatcgcagcagtggtgatcttcattctgatgatcatcatgggtcaggcgctgttcggcacctacctgcgtcttggattcgtgtcgtccctgttcatcgaccatgcctacctgattattctggccgtggctatgacgcttccggtattgaccggcggcatcgatctgtcggttggcgccatcgtcgccatcaccgcggtcgtcggtgtgaaactcaccaacgcaggcgtcgcggctccgctcgccatggtcgtcatgattctcatcggcgtggcgttcggcctattgaccggcaccctgatcgaagaattcaacatgcagccgttcatcgcgtcgctggcttcgatgttcctggcgcgaggcatcgcatccatcatttcgaccaaggcgcagaccttccccgaaaataacaacttcgatttcatttcgcagaagatcaccatcatcgacaatccgaagatctcccaagatctgtacatcaatgtcggtgtgatcattgcggcgctcgtggttatcttcgggtacatcctgctgcaccatacacgcaccggacgcaccatctacgccatcggcggctcgcgctcctccgcggaactcatgggcttgccggtcaagcgcacgcagtacgtcatctacctgacctccgccacactggcctccatcgcctccatcgtgtacacggccaacatccgctcttccatcaacacggtcggtgtcggctgggaacttgatgctgtggcctccgtggtcatcggcggcaccatcgtcaccggcggcttcggctacgtgctcggttccgtcatcggcgctctggtccgttccaccatcgacccgctgacctccgacttcggcgtgccggccgaatggaccaccatcgtggtcggcctgatgatcctgatcttcgtggtgctgcagcgtgcggtcaccgccttcaacaagaaagaataggaggaacggctccagttcataccatttgtttctgattccctttgcgtaaggctggacgtgccgaaatggtacgtccagccttacgcatgccgttcccatctaggtcagggcttccattacactacacagtggttttcatacgaatgaatcatagacggcatcgcacagggccgtaggaaaaagtgcgcggataaggaattatggaagaacggaacattactacaacaactgcagccactgaatcgcaggcgattacgacaaacgccggaactcaggaagcggcgatttcagacgaacgcatccccggcaaactcatcggagcgattgtggcggtcggctccctcgccttcatcggcattctcaccgaaaccgtgatgacggtgcttttcccgcaactcatgcgggaattcaacgtcgataccgcaaccgtgcaatggatcaccaccatctacctgctggtggtggccgcaaccatgccgttgtcgtcgtacctcaaccgtcggttcaagcatcgcacgctgttccttgccgcggtgtcgcttgcggtgctcggttcgttgatcatgatcgtcggccatgcgttcccggtcattctcatcgcccgcgtgattcaaggcatgggttccggtgtggccacgccgctgatgatcaacatcattcttgagcagtcgccaaagagcaaggtcggacgattgatgggcgttggctcgctggtcattactgtggctccggcaattggaccgaccgtgggcggcgcggtgtcgagtattctgccatggcgtgcgattttcgtaatcgtcattccggttattctgctgatttcgctgcctgtcggtttgaaatgcatcgaacagcatcgtccgacggaagaagcgcgtctcaatccgttgcagtttgtttcgattgtgcttgcgctgtgcggattggtgatgttcctgaatcaggccggtgttgcggtcagcgctgcggttgccggcagtagcgccacggtgtcggcggtgttcgccgtggtgagtctgatagttgggttgggctcgctgttgttcttcggctggtcgtcgaagagttcgttctcgccgctgattcgtttgggatggctacgtgatccgatggtgttgttgcatttggttgcctatatgctgctgccgatcgtcggcattggttttggctatgtgatcaccaatgtggcgcagctttcgttgggcaccagcgcgttcctcgccggtgctttggtgttgcccggcgctttgatcggtgcgttcttcgcaccggttggcggtatgctgtatgaccgttttggaccggtgcgtccgattctcgtcgcgtttttcgccgcgatttgcgggccgattctgttgctggtattttccatgcgactgacatccgtcatgcttgccggtttctatttcattttcgggcttggctattcgcttggtttttccaatatcatgaccaatgcgttacgcaatatcgcgcctcagtttatgccggacggcaatgcggtgttcaatacctgcctgcagtttggtggtgccgctggcacggcgctcttctccacgattctgtcggtggctcaggctggcgcaggcgaagaggggggtgccacgttccgtcacgctacggctgtcggtggcagctggacgttcgctaccatgattgtcattgtctccgtagctatctgctgcctgattgcggcgttccgaatcggtgcaaaacgtaaatagccggctatagaaaaagcctgtagcgtaatgtgaggaaagcgtttcgtcaggaaatgccggcttgctatgctgtctctaccattatcgagaggacagcaatgaacaaccaacgtccgcatggcaacattaccgccggcctgctcaagccaatcactgcagcgctttccatcgtcgcgctgcttgcgggctgcggatccgtggaagcgaaagataccgtaaccaaagtcgccagtgccgataaggtggtcagcgtcaacgttacggaaccgtcgaacggtctgctgccaagcgataccagtgatatgtccggatggaaggtcgtcagccaactgtacgacggtctggtcacattcgacacggaaggcaatgaaacactggtcgaagccgaatcgatcacgccgaatgatgacgcttccgaatacaccatcgtgctcaagccgaatttgaccttctctaatggtgagaagatcactgccgacacgtatgcgaaaagctggtcgttcgcggccaacgcggccaacgggcaggtgggagcctccattttcgaagacattcagggctacgatgagctgcaggatgctgaaggttccaaaaccgcgcagctatccggccttaccgtggtcgacgacaccacgctgaaggtcaagctcaaagcgtcgaactcggcgttcctgtacaaaatcggagacatcgccttcttgccgatgccgtccgaagtcatcaaaaatcccaaggcatacggacaaaaaccgatcggcaacggcccgtacaagctgaaggcgtacaaaagcggcgaagaaatcatcctcgaaaaagacgactcctacaaggggccgcgcgaagtcaagaatgccggcattgatttcaaggtgtatcagagtcttgacgcagcctattcggatctgctggcaggcaacctcgacgtgcttgatgccattccgacttccgcgttgaaaacctatcagaacgaaaagagcatcacggccgtcagcaagcctggaccgtcgttctcagcatttacgatttcgcagaatcttgatcatttccaaggtgaggaaggcaagtatcggcgtcaagccatcgcgcatgccattgaccgtgagaatatcgccaatgcgattttcggtggcacggtaacgcccgccaccgatttccttgcgccggtgatcaaggggtatgacaccgatctcgacacggatggcgtgctcgcatatgacgagacgaaagccgaggaattgtgggccaaggcggatgccatttcaccgtggagcggcacgttccgcatcgcctacagtgcagacggcaccgataaggagtgggtggaggctgcggccaattccattcgcaacgcgcttggcatcgatgcggaaagctatccgttcgccacgtccaaggaactgcgcagcgccattcaggagcgcaccatcgacgcggcattcaaatcgggcatgcaatccgattatccgcatccggaaggctatctggtgcaggcatacgactcatcggcagcggacggcaagggtttgaacaacggtgattacaagagcgacgaatttgattcgctgattgaccaggcggctgcggagaccgatttggacaaggccgtgagcctgtatcagcagagcgaacgtgtgttgctgaaggatttgccggtgattcctttgtggtataccaacgtgaccgcggcatcggccaaaaacgtggaagtgagctacaactatatgggcgttcccgaatacaacgccatcgtcaagtaaggtttgttctagcgtgaagactccactgtgagcgcaatttcaccacccgtcgcttcgaagcggtaggctgtgaaactatagagaacataggaaaaggagacaaggtgagcaacctcagtgcacccctgcccgtcatggccggcgaagatatgccggccggacccgccgatccgattttcaaccgtctgctgaaagaccgcatcatttggatgggcgaggaagtcaaggacgaaatggccaatcgcatctgcgcacagatgctgatgctggcagctgaagatccgaagaaggatatttggctgtacatcaattccccgggtggttccatcaccgcaggcatggccatttacgacaccatgcagcttatcgagcctgacgtggcgaccgtcggcttgggcatgtgcgcatccatgggccagttcctgctgagctccggcaccaagggcaagcgattcctgacctcgcatgcccgtgtgctgatgcatcagccgtccggcggcatcggcggcaccgccaccgacgtgcgcatcaacgccgaactgatcatggacatgaagaagaccatgagcgagctgactgccgaacagaccggccataccgttgaggaaatctaccgcgacaacgagtacgaccactggttcaccgcgcaggaagcgctggaatacggttttgtggataagctcgtttccacgcacgacacgatgaacgccaccaagggagagtgaacatggcaagcgaagaatcccgattcgtagcccgcgcagagcgtctcgcaggaccgaccggagtggttggtttccaggctgcagcagcccgcgaagccgctttcgcgccgcagaaccgttatgttctgccgcagttcgaagagaagaccccgtacggtttcaaaaggcaggatccgtacacccgcttgttcgaagaccgcatcatcttcatgggcgtgcaggtcgacgacacttccgccgacgacattatggctcagctgctggtgctcgaaagccaggatccaaaccgtgatgtgatgatgtacatcaactctccgggcggttccatgacggctatgaccgccatctacgacaccatgcagtacatcaagccggatgtgcagaccgtatgccttggacaggccgcttccgcagccgccattctgctggccgccggagccaagggcaagcgtctgatgctgccgaacgcgcgcgtgctcatccatcagccggccatcgatcagggcttcggcaaggcgacggaaatcgaaatccaagccaaggaaatgctgcgtatgcgtgaatggcttgagaacacgctggccaagcataccggtcgcgatgtggataagattcgcaaagacatcgaggtcgacaccttcctgaccgcacctgaggccaaggaatacggcattgtcgacgaagtgctggaacaccgtagctgaacggcgcatatgcgaggttccatctgaagtcgcatcttcacaaatcaatacccctgccgggcgttggcaggggtattctgttcttcaatgatgattgcatgatggcgattgcccaatggcaggtacggcaaacaaaggggtgcgaatgggacgagtggtcagctacaacgacgaagtgtcacgatgcacgttctgcggcaaaaccgaaaatcaggtacgtaagctcgttaccggatcaggcgcggccatttgcgacgaatgcatcgaactgtgcgtcgacatcatttccgaagaacgtgtcaaagacgcccagctgaacacattgcagctgccgaaacccgcacagatcagcgcctatctcgacaactacgtggtcgggcaggaatccgctaaaagaacgctttccgtggccgtatacaaccattacaagcgcgtcaatatggaaatgcgcgaatccgcggcattgcgcgatcgtgcggcgcatgcgagcgacgatccactggccggcgtgcaggtgtccaaatcgaatatcctgctgctggggccgaccggcgtgggcaaaacgtatcttgcgcagacgctggcgaaggtcatgaatgtgccgttcgtcatcgccgacgccaccacactcactgaagcggggtatgtgggcgacgatgtggaaaccgtactgcaacggcttatacaggccgctgacggcgatgtggcgcgagcgcagcagggcatcgtctatattgacgaaatcgacaagatagcgcgtaagagcggcgagaacacgtctattacgcgagatgtgtccggtgagggcgtgcagcaggctctgctgaagattttggaaggtactgtggcatccgtgccggtggagggttcgcgtaagcatcgtgagatggagacggtgcagatcgacactcgtgacattctgtttatctgcggcggcgcgtttgtcgggcttgccgatattgtggcgcagcgtttgggcgctcgtgaaagcggatttggtgccgcgtggcatgatcatgaggtgccgaatcgtgagctgcttgcccaggcttcggccgacgatcttgccgatttcggtttattgcctgaattcatcggtagattgccggtggtgagcgtgcttgaggagcttacggaggatgatttggcgcgcattctggtcgcaccggagaacgcactggtcaagcagtatcagaagttgtttgcgattgacggggtgacgttgacgttcactgagggggcggtgcggcagatcgcggccacttcgattcgcaggggcacgggcgcccgaggccttcgatcgattatcgaaaaaaccttggaggacacgatgttccagctaccaagcgtgactggcgtatcggaggtggtggtggatgaggcgtccgtcaatggttccggcactccgaaactattgaaggtttccacggaggagattcctcgcagacgtgccgcgtagtgcattcggcgtgttgcgcgtcgtatgtgcgagagttcagatttcgtagggttgaagcaagtatggatgccggtgcgaaatccacgaaaacaggcgcgacacgccgagattttgctgcgcggccatttgggtgtatcttattcgagttgccgaaaacaagcaacgttgcgcgagtagcccagcggattagagcagctgactacggatcagcaggtcgcaggttcgaatcctgtctcgcgcaccggccaccggtcatcaggtggcgtaaataaatgagatggcgttgcgcgagtagcccagcggattagagcagctgactacggatcagcaggtcgcaggttcgaatcctgtctcgcgcacatgaacctccttcgcgaaatgcggaggaggctttctttttttctggaagtaacggcggcgctgccgtgaatagtgttcgagtcaatgcgattcgcaaacctaccagaatgcttatgtaaagcggctgttgtcgagatacgttcggtttctctccgagcgaacggtgtggtacaagaaaagccgccatgccgaataaaaccgtaaacaccagtgaaaaagacggtttggaaacataaacgccgacacctctcggtacactggaaccgctattgaagcgtctgcgcatgccaataccgcagacgcttttcttaagtgaatggcgggccgtggatactcgcggcaacagacgggagagcaatgaccgaacgtaagcagggactctgggcgaaaatacgatacatagccgcttccgaccgcatatctggtctgattatgcttggcttcgccctcgcaggtctgttgcttgccaatctgccgttcacggcgcatgcgttcgaagagttggagaatttccgcatcgccattccctacaccaatatcgatatgggattgggacactgggtgcaggatggtctgctgacggtgttcttcctgactgtcggactggaattgaaacaggaactcgccacaggttcgctgtcgaaccccaaggctgctgcagtgccgatgctgtgcgctgtgggcggtatgatggctcctccggtgttgttcctgctggtattgttcctgttctccggtttcggatccgatccgttggccatcgcttcgggaacgagtttcacctttggtgagatgtctcatggttgggcggttcctacggccactgatatcgcgttctctttggctgtgcttgctttgttcgccaaagcgctgccgggctctattcgcgcgttcctgatgacgcttgccacagtggacgatctgctggccattattctgatcgcggtgttcttctcttcggtgaacgcatggtactggttcgtcggcatcgccgtatgcgctgtcgtatggtatttcctggtgcgtatgcgcaaagtgccatggcttgccgtggccattgtcggcattctggcttgggtgatgatgttcgaagctggtgtgcatcctactttggctggcgtgcttgttggattgctcacgccggctcatgagcgtttcggagagaaaaccccacgcgccgaacgctatgcggacaagctgcagccgttttccgcgttgctggctctgccgattttcgccttgttcgccactggtgtgcattttgaatcgttgacgttggccctgttcatttcgccggtcgtcgttgccgttatggtggctctggtggtcggcaagccgttgggcattatgatcacggcatggctttccacgcatgtggccggattgaaaatggctaagggattgcgtgtgcgcgacatgttccccgcggcctgcgcatgtggcatcggctttaccgtatctttcctgatttcctcgcttgcatatcaggatgccgaactgtctgctgaagcacgtttcggtgtgttggtcggttccatagtcgcggcggtgatttccggcattctgctgagccgccaatccaagaagtttgagcttgccgctgccgcatcctcgaagcataagcatcatactgctgacgaggatgctgctggggaagtggaatccgtgttggaagacggcactgttgtggtcagccagatgatcgacacacatccaaaggtcaaataacgacgttccggcgtatggcattccgcgccatacgccagacacaacaaaagccgacactcatcacttatccgtgagtgtcggctttttgtatgaggaaacggtaggccgctgggaacggcatgctctagcgcttgacggccacgagcaaacctgtacctgtcggggtgagggcagtgacgaaacgctcatcggattccacggtttccagcaaaccacgcatggcaatggatttggcgtcacgattggcgggattcaaaacgccgcctgcggatgtggctgaatcaaaagcaagaatatcggtgaacacgattacgccatgcttcttcaacaggcggggagcctgctcgaaggaagcgccgtaattttccgcgtcaccggcaactacaatcaaatcgtagttttctgcattcagacgtggcaaaaacacgtcgacgggagcgttgacggcgcgaagcgtggtctgtgtctcgtcggaaagccgattaaacaacgtacgaatcagcgcaataccctgggaagaggaatcaaccgccgtaagctgaccggaattatccaaaccgttgaccagctgcaacgtttccaccacggaaccggtgccgacggcgatcaccgatgtcgcattcaccatatgcacgagcatgcgcaacagctcggcttgggctgctgaaccctgcggaatgcctgcttcttcagcatgggtgcgaatagcattcaagtcggttgactggcgggagaacgcatggtcctcaacgtattcccatgacttggcgagattggtatatgacgttctatccatgggttcagcgttccttgacttgggcgatcagctgccagatttcctcgccgacgtcaatgccacgcgggcattcgcgggtacatgcgcggaccgactggcatgcggcgatgccatcggcggaatcaatggcatccatgcgtgcgttcgcctgaccgtcgcgggaatcgttgatgaaacgagacgccgcgataagggctgcaggtccgatgaacgcttcgccgcccgcatacacagggcagctgccttcgcaagtgccacaggcgatgcagttgctgagaagctcatacttggcaagctgctggggattctgcagatattcgaaagcgttgatcttgccatccgcagtggtggcgagttctccgcgcgcctgcagatagggcttgagttttctgatttggttgagcatctgatcgatatcggcaatcaaatcgcgctgcaccgggaaacccggcaggggagcgagctcgatgacgccaagatcccctgcgccgaccgcattttcctgaatgtcggaaacatctccggtgtgtcggaatccttcatcgtcgaccaatgtcggattcgacggtttggcccaatccttgacggacgcggtgcacagcagggtgggggtgccgttgatggacaccgcatcggaaccgcacatgccatgtccgcacgaatagcggaatgccagcgtcggatcgatggtgcgtttgatcttcaacaggcaatcaagcaccgtgtcttccggacgcacgttcaacgtgtaatcctgcaaccactgcttgccgcgcgggcggcggcgcgccgacgtgccggaatccccaaacggagagctttttctggcgaacggagagccgccacgttcgcggtcgcgggcacgctcggcgcgcggggcaaacctattcacccgcaatgtcaccgtattcacgccgttttccataccgctcatgtacccgcctttccaataaaaccgtcaactagtctgccatacgccgtgcccagcggaatcagtattcgcgggcttttggcggcatattcacaatgtgcaccggctgccaggaaatctggccggaggcattcaccatggaatgggccaggaaatgctcatcgtcgcgttccggaaaatcaagacgcttcagcgagccacgggattcgtgacgcgcatcggatgaggtgagtacggccttgccgagttccagaaggtggcggacctcccaaatggcggtgatctcctggttgaacgtgggggagtcggaatgcgcgtgcagggcttcggcacggggcgcaaactcatcatgcaatgccgttagcgcctgttcgataccctgctcgtcgcagcgcacggcgacagcgcgttccatgacggtacccagatcggccatcagctggtaaggattgtcggctgcatgctcctcgtcttccggaagctgcaccagcagatccttgagttcgttggaacgggtgtcagcggcctgctggaccgcatccgaaccattgtcggcgtcggattcagccatgggatcgttcactggagcgctggaaatgcgttccgccagcgccttgccggagcgggtgccgaacaggcatgcatccagcagggaattgccgccgagacggtttgcgccgtgcacggacacgcatgcgcattcgccggcagcgaacaggccttcgacgacatttcgttcgtcgttctgccaacggtagacttcgccgtcggtggtgatcggaatgccacccatggtgtaatgcgcggtaggcttaaccggcacgaaatcgtgtgtcggatcaagatccgcatatttttcgatggtttccaccacctgcggcagtacctcatgcatatggtcggcatcaataccggtcatatcaagccacacgcaatcctttggcccttcggggtccttcggatccgccacgccgtggccggcatcgatttcagccataatggaacggctcaccacatctcgtgcagccaaatcggcatggccgggagcatacttttccatgaatgcctcgccatcggcattgcgaagcacgccgccttccgctcgtgccgcttcagacagcagaatgccggtatgcgccagaccagtcgggtggaattgcacgaattcgctgtcttcaagctgcagtcccgcttgcagtgcgagagccatgccgtcgccggtcagatcccatgaattggaggtggtgtggaataggcggcctgcgcctccggtggccagaagcacgttgcgtgcgtggatggcgtgcgtttggcccttatgcgtgtcaaatgccactacgccttcgactttggatccgtcttcggtgattaccagatcggtcacgtaccattcctcggcgaattccacgccttcggccacgcattgctgccacaaggagaagaggatctgatggccgatgcggtcggccgcataggcggcgcggcgaaccggttccttgccgaaatccttggtatgtccgccaaaacgtcgttgtgcgatatggccgtcctcagtacgggagaacgccacaccgtcatgttccagatcgattacggtttccgacgcctctttggcgagcagttcggccgcgtcctggtcgacgagccaatcgccgcctttgaccgtgtcgaagtagtgccagtgccagtcgtctttttcgacgttgccgaggctggccgcaatgccgccttccgcggaaccggtgtgcgagcgcaacggctggagtttggagatcaccaggatgttcggctcgatgccggcttccttcagggcttgcatttgttcgcttcgcagcattcccaatgctgcggacaggcctgccgcgcctgcgccgacgattactgcatcatacatatcttcaacatgcttcggactcatagcaacgattttcgcacaaggtgtgacctcattgcggtttgccggttggcgggtttgccgctgcatgcgtggttatgcgtgtctgatgcgtatgttttcgatggattccgttgatctgtgcaggcttggcggtggcgttgttgggcgtgatgtcatgtggcgcttgcgtcggtgatggtgatgttgccatgctgtgtgcagataagtccgttgagttccattaatcccagctccatgctgattcgtgagattgagtattctccgggattgctttcggccaggatggcgagtagaccgtcagtggagacgtggccgtatttcgcgctgcatgttcgtatggctttgagtatggctgcagtggcgttggttggttgcgacagactggtgtcggttgactcttccgacggttcgtcgtcgttgtctgccgcgtcggctgattgcgggcgatgcgctgcgtggcagaattcgtcgatatcggtcagcgagcagatgatggaggcttggccttcttgtatgagtcggttgcatcctgtgttgtgaggcatggttacatctcctggcacggcgaatacacggcggttgagttcgttggcccatcctgcggtgttaagcgcgccggagcgtgcgcgtgcctgggctacgatgagggtggatgatagcgccgctatcaggcggttcctgataaggaatcgtctggcttccggaacggttccggggcagagttccgagatgagcgcgccggaatggttgatgatggtttcgaagaggcgctcgttgcttttcggaccgatatagttgagtcctccggcgaataccgcgacggtgcgtcctgcgaggggcgttccgatctcgtccatggcttggatggctccccagtgggcggccgcatcggtgcccagagcgcctcctgacactatgagatggcctgctcgggccgcttgtttggcgagctcgtgtgcgctttgccttccgtactcgcttacgccgcgtgatccgacgacaccgaccggttcggagcatgacaccaacgcttgggggtcacctttcccccataggcataatggcgcggcccagtccgtgtgtatggtgaggtcggcaagctgcgaaggccagtaggggtgatgcggcgcgacgatccactgcgtgccgtttgcggtgaaccacgttttgagctcctcggggtcggtgctgggcaatgtggtcaggcgatgctgccacgagaccattgcgccgtggaaggaggccatacctcgagcattgatggtgcgtccccaacgtgtaatgccgttgatgagcgccgcgtccaaggttttataggctgccgtggccacgctttcatgattgcccggaccgctgtcggcaagcagttgcaaggtatgcgtggctgatccgatgcctttgaccagcgcgtacatcatcgcatcggcgctgtccagacaataggtgagcaccgcgcgtgacagggtctcatcgtcgatggcggttgcgttgacgctcgtatcggcggttgtgttctcgttcatgtcaacctcgttctcatggagattccttgcatcatctcttccggtccgggagaggttttgcctgacaggtcggatagcgtccatgcgagtcgcatggctcggtccgcccctctgaggctgagccgttcgctggccaacgcatggttcacgagctcgatggcttttgtggacgtgttggcgcgaagccatgttccggtggcttgcgcattgcagacccatccgaattcccggaaacgttcctgtgccgtttgccttgccaccatgacccgcaggcggatggcgtggctggattcgccggaaggaaccgtgcctgggttgatgcgttccacaggaggcacttcgatctgaatgtcgatgcggtcgaggatcggccccgacaggcggctgaagtacttgatacggtctttttccctgcacgtgcagcgctcgccgttgccgtatgcgtagccgcaggggcaaggattggccgccatgatcagttggaatcgtgccggatagtaggtggtacctttcgcgcgggatatcgccacatacccggattccaatggttcgcgcaaggtttgcagggtgcgtgccgagaattcgggcgcctcgtccatgaataggatgccccgatgcgcccgcgtgatcgcgcctggttgagccaatcccgcgccgccgccgaccaaggatgcggtggatgcggtatggtgcggcgcttcgaatggcggaacatcgctgatgccatagctgggcaatgtgccgcatagggagcggatcgatgcgacttccagttgttccgattcgctgagcggactcataatgccgggaatgcgcgaggcgagcatggtttttccggtgccgggaggaccggtcatcatcagatgatggccgccggcagccgccacttccaacgcccatttggccgtttcctgccccatgacttcgttcatatctccgggaggaggacataccgacatggcgccgtcgttggcatccacgtctcggatcatatcgggtatcgtatagttcgcggtgcctcccatcagttcgatcagttcgccgacgtgacgtattccaatggcgtcgacgtcgggcacaagggccgcctcgtccaaattggcatgcggtacgatcaccttgcatacgccttgatcgcgtgcatgcagcagaatcggcagcagaccgttgatgggcagtaccgtgccatcgagattcacctctccgagcacgacggtgtcgttcaagcagtcatgcggtatcgttccggatgcgctaagcacgctcgctgcgatcgccagatcgtgtgaggatccgcgtttgggcatggacgccggcgaaagattgaccgtaacccgtgtctccggccatttggcaccgctggcctgacatgcggatttgacacgttccctcgcttcggagagcgaggtgtcgggaagtccgatgatggaaaagtaggggagtcccggagatacgaacgcctggatttggatgatgaaggctttcaggccgatgagacccacggaaagcgcgctgccgatagccatcagaacgctccttcgatatggtggacaagcggtttgccatcacggacgatgacggtgacgacgtcgaagcgcacgccgttatgcggcgtgcgatggtcgctgtccgacagccattgcacggccgcgtggcgcaggttgatctgcttggatgacgtcacggcttcctgcggagtgccatagcggagcgtccgcctggttttgacttcgacgaagacgatgattcccgtatcgtcgcgtgaaacgatatcgagttcgccatatcggcagtgccagttgcggtcgagcgtctgccagccttggccttccagccatgcggccgcatactgttcgccgagttcgccgacctgtcgtgcgcacagtgtgccatcatgcagtcgccgtgcgatggaatcaagaagctgttccgagcgctgcgttgcgttcggaacgttatgtgttgtgttgccgttcatgattcaagtccagcagaaaggaccggcgcgaagcaagggcgaacggcgaatgtggatagaggatgcggtttcgggcgtgtttgggatagttggtggataacttgccgttatccacattgctccacaaggcgagcggccatggagcgcccgaaaccgcatatggttggaatgttcagcggcgaaccagacgcgtcaactcgtcaaggttcagctcgaagctcacaccgcgctcagtgtggttcggctggaattgcgtgctttccatggcatggcgtacgaattcgccggcgatatgcgccgattcagccagaggtctgccggccatcaccgcaccgcataatgcggatgcgaaggcgtcgccggtgccatgtgtcatgaacggcagcttgtcgtgcgcaatctcttgcttgccggatgcgccggaagtggccgatgccacatagttgcgaatgatgccatcctgacggtcaacgcctttgagcaccacgtttttcgctcccaaggcaagcaatgcgtcaatcatgtcatttacttcggcatcgctcagatcacgccccagatatgcgcgctttgtcagtatggacgcttccgtcaaattcggcatcagcacgtcggcgccatccaccagcgtgcccatagcttcgcagagttccggcgtgtatgtggcgtagatttcgccgccgtctcccattaccggatccaccaaacgtagggcatgcggatattgcgaatacagtcgtttgatgatctcaacctgttcggcggagccaagaaaaccggaatacacgccgtccaaatcgacgttttccttacgccatgcgtccagatagccgtccaaaatctcggtcgtatcgtggaaggtgaatacgctgtagcgcgtgtgtgccgaaaatagcgcggtcggcaccggacatacgtcgcatccggccgacgacaggatcggaatggccgccgtcagcgagcaattgccgtatccgcacatgtcatgcaccgccgcaacgcgcggaacataatgcggatcgcgatcatacagaatcacgtcatccatgttgaaaccctctcttgcgattgtctgaccacgactttagccgcccgtctgacttcggagccatgatgcttcgtacggcgtatcatcgcagtgccgtttgccggcgtgtcgcagattttcagacggttgtcagaacggttttatagagcatgaatggcaatgattccaacggtttataaagggatataggcaagtgcgataacgtttggcttgcattgcggagcgcggccggattattgtcgctaccaacacctgaccagccgccacacacggcaaggcgggtggtcagcaagacaggcaacgaaccattccacacaaggagcagaaaccatggcagattccaagaactaccgcttcgaaaccctgcagcttcacgtcggccaggagcaggccgatccggcaaccgattcccgcgcggtgccgatctaccagaccaccagctacgtgttccataatttcgaccacgccgaggcccgtttcgggctggcggatccaggcaacatctacggccgcctgaccaactccacccaaagcgtgttcgaagaccgcatcgcagccctcgaaggcggcaccgcaggtctggccgtcgcatctggcgcagccgcggtcgaatacgcggtgcgcaacatcacccagtccggcgatcacatcgtcgccgccaagaacatctacggtggcaccttcaacctgctgcgtcacaccctgccgcgtgacggcatcaccaccaccttcgtctccgccgagaatccgcaggagttcgaggacgccatccaggagaacaccaagctcgtctacttcgagaccttcggcaatccgaacgccgacctgccggacttcgaagccatcaccgccatcgcccacaagcatcatctgccggtgatcgtcgacaacaccttcgccaccccgtacctgttccgcccgctggagcacggcgctgacgtcgtagtcgaatccgcaaccaagttcatcggcggccacggcaccaccctcggcggtgtgatcgtggaaggcggcaacttcaactgggccgaagtgccgggcaagttcccgaccctgaccgagccggatccgtcctatcacggattgaacttctacgaggccctgggcggttccgcgttcgtgacccgcatccgcgccatcctgctgcgcgacaccggcgccaccctgtctccgttcgcggccttcctgctgctgcagggaaccgaaaccctgtcgctgcgtgtcgaacgccatgttgagaacgcgctgaaggtcatcgactatctgaagaccgttccggaagtcgagtccatctcccacccgtccatcgaaggccgcaaggacaacgatctgtacaagaagtacttcccgaatggcggcggctccatcttcaccttcgacatcaagggcggcaaggacgcggcacgcgtgttcatcgacaacctgcacctgttcagcctgttggccaacgtggccgacgccaagagcctcgtgatccacccggcctccaccacgcactctcaggagacagtggaggagctcgaggaccagggcatccaccagggcaccatccgcctgtccatcggcaccgagaacatcgaagacatcctcgacgatctcaagggtggtttcgcggctctgcgtgaatctggtcttgccaagtgaaatgcatcggatcggcggaatagcgccatcctaaacaaatgaaacggtctgcgacaccgaaaagaaggggcggtgtcgcagaccgttttgtcgtatctgcaaacgatgtcatctcaatgtattacagctggtatagaatctgcgattgttacgaaaagcaatatctcaattcttttctttgaaagaaaaaacattagattctttcaaaaatacaagcattaccgatgatattgagaataacgtaaagagagaagagatcatggcccaagaagtcaagaacgatatcaaaaaggcgttgcaggtcaacaccattccgctgatcgccattatgaccgcggtcaccacggtgctgaccatgcttgtgaagatcccgaccccgattcgtggctacctcaacctgtccgacaccatgatctatttcagcgcgtatgcgttcggaccatgggtgggcggcattatcggcggtctcggcccggcgttgagtgatctgatctccggttatccgcagtgggccatcttcacgttcgtcatcgatggcctgcaggccgtgctcgtgggcctgctcgtcaagaagttcaatccggcgaacatcatcatcggctcggtggtcgcaggcgtgtggaaggtgttcggctatttcatcgcaggcggaatcctttccggattcggcccggctctgggcgagatcgcgggcaactccttccagatggcggtgggcctgattgtgggcttcgcgctgttcaccgccgttcgccaggcttatccgccgctggtgcgtttgggcaatctcagtatcaaggcgggggagtgatacattaatatcatgtgaaggcaggcccgtggatttgccgatgaatggcgattccacgggttttattgtgaaacgcggctgccggctgcgaaaaaaatgcgtggaagcacggggtggacgtcatgattacggttcgcgacttagggtggaagtacgcgccactggccgacgggggtaagccggtggaaagcctcaaacatgtcagcttcgacatccggtccggatccttcgtcggcatcatcggaccgaccggagccggcaaatccacgctatgcatggcattggccggcatcattccgaacctggccgacggcaccatgagtggcgttgtggaaatcaacggcatgaatacgagcaggcactccgtctcggcgctgtcggagcgcgtcggctacgtgcaacaggatcctgaggcgcaactgttttgttcgagtgtcgaggatgagattgctttccctttggaaaaccgtggagtcgcaccgagcctcatcgataagcagatcgacatcatgcttgacttggtcggcatgaccggataccgcaaacgcatgccgaccagcctgtcgggaggtcagatgcagcgtgtggccatcgcggccgcgctcgcggcggaacccgatgtgctcattcttgacgaaccgactgcggcacttgaccccgaaggcaagcaggaagtgttcgatgtgctcgaacgcattcgccagacccgttccatgacggtgatcatagccgaacaagataccgaacacatcgcctattgggccgatcaggtgctgttcatggtcaacggcgaagtgatacgcaatggagacacaagcctattcacccgggaacgcggactgttggagtcctccggagtgcaggtgagcgacggaccgtcccccatcatcaaggcgctgccggtaaggaacgacggcaagccgaagcatgcggtcatcagtctggaccatgtgacgcaccgttatggacagggtggcaatgcgtctcccgcactggatgatatcagtctggatatcgaacagggcgccttcgtggggcttatcgggcgcaacgggtcaggcaagactacgctcgccaagcatttgaacgggctgatccaacccacacagggaatcgtgaaggtggatgggctcgacgtatcgaagcatagcgtgggcgaaatggccgcgcacgtcggattcgtattccaaaatcccgaccatcagattttttgctccagcaccaaagaggagatcgcgttcggtccgaccgcgctcggacttgacgcggccaccgtgttcaaatgtgtcgacgaaatgatgacattattcgacctgcaccggtatgaggacgtttcgccggccacgctcggttacggcgaacgacgtgcggtggcattgtcttcggtgatcgccatgcgcacgccaatactcgtgctcgacgaacctacggcgggtcttgaccatcgtctcgcatcacgattccttggaaccgtggaaaaactcaaccggcatggcgtcaccgtcatcatgatcagccatgacatgcgtgccgtatatcggtattgcacgcacgtgctcgaattggaagacggtcatatcgtgcaatatggaccgatcgacaaatcgcaggaagcacaacaatcgcccgtgcgacaggcgcggcaaccgcacaagtcgcgcggtccggtatcagcgacccacgtattgttgaaaatcgccaaggatgaatgcgacaaggaggaacgctgatggatgccgacctgtatgtaccagtcgacggatggttgcatcgcaccgatccgcgcgtcaaattcctcatctccatcgtcatgctggccctttgcctcgtatggcgtaactgggcgttcatcctcggcatcctcattctcgaacatgtgatgctcgccaccgaccatgtgccagccgagcgcattggatgggtgtggaagatcctcgccgtgcttatcgtgtttatcgtggtgctttggccggtcttcgaccagagtggaacgcacgtgctctggcagtggggatggctgcgtctcacgcaggagaatctgctcatggcggcggtgatgggtctgcgcattccagcgctcggctttgcatgcttcatcacgctgttcaccaccagccagaccaaactggttcgtggctttacctcgctcggcatgccctacaaggccgggctcaccttggcaaccgcattacggtatattcccgtgttcttctccatcttccaatccgtgtccgacgcgcagcgtgcgcgagggcttgatctgagcggcaaagtcaatgcggcaggtaaaaaacgcaacgtattcgtacgtctcgtcgaccggttcaaatcgtatttgccgatcatcatcgccgtattgatccgcgcctacaaaatgagccaaagcgtgggatgggccatggaatcacgcggactcaacctgaatcggaacggcgcaaaacgcacatatcgggtcaaccttacgatgaggattgccgattggattattcttgcgattaccgtcgccgccaccgcagtcagcgtgtggttgatgacatggctgtcatagggggtatgatgacgcaggatgaggggcgtatcacgatcaccgcacgcgatttgaaggtggtatcggcgctgcaatgcaacggacgcatgactatgcaggcgcttgccgataaaatcggcatttccgtatatgcggcgacggaaagctacaaacggctcaccgatgcgggcatcatgaccattgtgcccgtatgcaatccgttgagtctcggaaattacagtcaggtgctcgtgggactgcgcatcaacggcaatcgcaacgaggcgctcgccatgctcaaagccatgcctcaggtcacctatgtggtctgcacgctgggcgatgccgacatcatcgccgaagccgtggtgtattcagccgacggcatggaccatttcctcaaacatgatctgcgcgcgctaccgggactgacccgcctgcaagtgttctcctgcggtcgattggtgcttgacgaccataatgtcagcgtggtcaaccgtctgctggccgaacgcggcgaaactggattcatgaccaaacgtgaggccagcgtcggcaccgatattcccgtgcatcggttggacgcgcgattcgtgcacacgttcaacgaattgcagaaagacggcagagcgagctacgccatgctgggggagcatcttggcgtgacacacaccgcgattcgcgggcgcgtcaaaaaactggaggattccggtgtgatgcgcattatggccacggtcagccccatgcgtttaggtggattccgccaagcgtttctcggcatcggtgtgaagcctccgtatcgcctcgacgtcgaacagttgctagcgatcgacgaggtgacatatgcaatgagcggagtcggtttgaatggcgccgactacctcatcgaaatcatcgccggagatgacgaggacttatggcgtgtggtggatgagtccatccgttcgctgccaggcgtggaccagacatggtgggcttccaccgtcagcgtggaaaaagagtcgtactggctcgaacctccgcaggatggtgtactcctcgacgattgataaatcaatggtatgagacgtttcatttttgctcattctcaaggatgagatgataattcagaccaacgcatgatatttgaatcagctgtttttccgtaattttggaggtaatccaaagaaaggaatgacagcatggatatcagggacaccatcaaagctaccaatacggccattgcaaccgtggatcttgtgaaggactacggttccggaaataacacggtgcatgcgttgcgtggcgtcaacgtcgcttttgaaaaaggaaaattcacggcgattatgggaccttccggttccggcaaatccacgttgatgcacacattggcaggactggattccgcgaccggcgggcacgtcatattcaacggcgacgatctgacgcgcatgaacgacaaccagctcacgttgctgcgccgccgtgacatcggattcatcttccaaagcttcaatctgttgccgatgttcaccgccgaacagaatattctcatgccattgaccttggctggagcgaaacccgaccggcagtggctgcgtctgctggtggaaacgcttggccttaaggaacgtctcaaccatcgtccgaacgaactatcgggaggccagcagcagcgtgtggccattgcgcgagcattgatcaccaaaccgaaactggtgttcgcagacgagcccaccggcaatcttgattccgtatcaagcgccgaagtgctgagcttcctgaaacgttccgtcaacgaacttggccaaaccatcatcatggtcacgcatgatgcggtcgccgcgtcttacgccgaccgtgcgctcgtgttcgccgacggccagatcgtggcggacgtaaacaagccgacagcagaccagatgagtgaactgctgatgaaggaacgtgaggccgccacaatgaatgtggcttccgcgagacattcccgctaaacgcactatagaagcattcgaagaagggaacagaatccaccatgtggtccatcactttgaaactcatgcgaaaaaccaagcgcatgctcatacctgcaggcatcgccatcatgatcggcacggcgttcatcgccagcaccttcctgttcggcaatgccatgaacgactccctgacacggcagctgaccgccatgttcggaaacgccaactatgcggtgagcatcaacagctccgacctgagcgataaggaactcaacgaggcgtattccagcactgtcggcgactttcatctcgaccagatcgccggcatcgaaggggttgacggcgtccgtgcctcggtggaaaccggcgtcagcgtttccaagggagacagcaccgtcagcggcgagatcatttccaccgcggcacagaagaacatgctccccgtgaatatcacggaaggggaccagccgaaggattccaacgaagtcgcgctgccggaagacatggcgaaacagttgaacgtcggcgttggagacactgtaagcctgacctcccgatatgcggtaggcgacgatggcaaagccaaggcggacaacgtgcgcgtggtaggactcacatccgatccgaacggcgcctactcatactatggtggtgcgatcgtaggatccaacaatctgcttgccgcaatgcagggagtggacgatttcaacgccaccggaacaacaatggtgtatctcgaccttgccttggatggaaacagcgtatccgcaaaaaccatcaacggtgtgaaagcgttgctgccaaagcatttcgatctgatgtcacgacagcaaatcagtgacgaaagcatcaaatccttaagcggcaaccaaaccaacatcgtcaccacattccttatgtgcttcggcgtgcttgccatgttcgtggcggctctggtgatcgccaacacgttccaagtgctcgtggcgcaacgccgccgcacactcgccttgctacgcaccatcggcgcaaagaaaggccaactgtatggttccgtgctgttcgaagcggtggtgctcggcttcgtcgcatccgtgcttggcgtggtgcttggaagcctgctcatgtggggcatgtgcgtcagcgacatcatgcaggcgggtatgcggttcaacttctcctggcaagccgccgtcgtaccgattctcttcggcattgtggtgacggtgcttgcatccatgggatccgcacgttccgccaccgcggtaacgccattggaggcattgcgtccgattgaactgaccgacaaccgtcgttccagccttacgcgagccataatcggtattctgatggtggtggtcggtatcgccatggccatattctccatctggcaggtgcaggccaccaacggcggcgaggatgcgagcggcgatcaattcacgatgattctgctcatagccatcgccggtgccgcactggtgttcctcggcatggtggtcaccgcggtattctggatgccgaccctcatgaagggcgttggagcgttggcctcgctgacaggtccttccgcaacaattgcacacgccaacattcagaagaatccgcgacgcatcgcagcaaccggtgccgctctgctcatcggtgtcaccttggtctccaccatcgcaaccggtgccgctagcgccaaagagactatgaatggtgcgctcgccacccgttatagcgtcgacatcgtggccatgggcgatgacatcagccagcaaatggtcaaggatgtatctgacatcaacggcgtgtccgacacgttgtatgcaccggcggtttccgtgaccttggagaaagcggatggaacccagcctacgtccgcattgctggtcggcgtgaaaaacatcgatcaggtcaagcaggtcatgcgtgccaacttgggtaacgcctccatcgacagtgatagcgtgctcatgccaacatacaatgcgcaaaccggcaaggagctgcagttcgccaatggcacggctgatttctccactgaatggaaccagaacggcgacgctacgcgttcgctgacattgcaagccaaccaagccgactaccgtcgtgtatccgcgcaatatggagctgtcggattcgtggatgaaagccatttcaccaatggtgaccttgatgccgccacccatgtgttgctggtcaaggcagacactgacaagtcgggagtttccgttgacgacatctacaacgacatgcaggccgcattggagaagagcactgatgcgacagtgaccggaccgatcgccgaacgcatcgtatgggcgaacatgattgactccatgatgatgcttctggtggggttgatcgccgtggccgtgctcatcgcacttgtcggcgtagccaacacgctgtcgctgtcagtgattgaacgcacccgagaatccgccacactgcgtgccatcggcatgactcgaggccagttgcgacgctccctcgcggtggaagccctgctcatctcgctggtatccggcatctcgggcgtactacttggcacactgttcggctggctgggcgcatacgtggtgttcagcatgtacggcaaagtggtgttcccgttcgaatggggcattaatggcatcgtactcgccgtggcagccgtggcagcactgctcgccagcgtattccccgcacgcagggcagtgagcacgcctcctgttgaggcgctcgccgaagcctaagcttcatagcaaacacaacgaaaaggactcctgccacaaacatggtaggagccctttttgcgtatcatgcatacgcaaaacaacaaatcaatcagaccaaatggttttcataggcgaacaccaccgcctgcacgcggtcacgcgcattgattttcgacagaatgtgcgccacatgcgttttcaccgtcggcaggctgatgaaaagcttgtcggcaatttcctgattcgacaatccatgcgcgatctcaataagcacttcgcgctcgcgatcggtcagctcgtccaattccggatcggtatatgttgaatccgtagcagaagtagttgcggaattttcaggcctaccgacgttcgtagccatgaagtcgccttccatcattttctcgataagacgtttcgtggcggacggtgcgataatcgcattaccttgaaaaaccgtgcgaatcgaattcagcaacgtttccggttccgtatctttcagcagaaaaccggaagctccggcagtgatcgcagccataacatattcatccaaatcgaatgtcgtcagaatgatcactttggtatgagtgacttctgattgcgttccatcggcagcaaagcgatgctgcaacgcactgatctgccgagtcgcctcaataccatccatgccgggcatacgcacatccatcaacaccacgtcaggatgcagcgtttccgccaacgccacagcctctgcaccatcgcgagcctgcgccgcaaccgtcatatcaggctgggagccgatcaccatggcgaaaccggcgcgtaccaattcctgatcatcggcaatgaccacacgaatcttctgttcttcactcatactctccaccttatcggcattgttccgctcacagcgcgaaacaaacccttaaatctccctgaaaacttgaatcgactattgagatgcgcgctgcagctgctcctccaacggtgctgcgggcctcaactgcagctcgttcgcgctaccggcatgagcgtcatcgctgaaaccagtctcacgaagcacgccaagcagttcgcgcatacgtttaagcgcggcgcgcccctgttcgccaatggctttgaacgctgtggaaatctcgtcggcggtaggctctttgccttgtgcttcggcgcgatccagcatgcggataccatcgacggcttgactaatcacgctgttcaacgtggcagtgacctcagcctgaatgctggcactgatacggtcacgttccatattcgccgcgagaatgcgctgcttctcttgctcggccaccagcgcttcctctcgcgcctgtaacaccagtgcgtttgaatcactggaacgagcccaacgtgcccacgccataatgccggcgcacagcatcagcactgcaaccgtatacatagcgccggtaaagaacgccgccgtattacttgaagtgactgaaaccggtttcgtcaagcctgcaaaagcggcgatggcgccgaacaaggtagtgtatccgtgttgataagccgcgattttcaagcccatcagcaccgaacaggtagcggcggcaagaccggcccaacgccatgcgtgttcacgcccatacaatacggctgaatacagcgcacacagcgacgctacgatatgtccaacctcaatcgactccaaaaacaccaattgcacaaccgacaatacgaacacaataagcgcgcaagtctcggggaaactgcgtcgaagagccagcgccagcaagcagcatgcggcgatcgcatgagagagctgcacatgaggtgaactatcaaaaaagaacgtaatcgacatgcgattcagcagcatgaccaatgccacggcatcaacggaatccatgagcgcataatggtgctgcgtccacgcggaaacacgttccacccaattcagtcctcgtgaattggatgtatttgcaagttctacggatttcagtttcaacgatttgagcaaatcatgcagattgggtgcggtgatgcgcaaatgttgcagggcattcgaacgatgatcgcgaccggtcggttggttggtttcctgcgtctgctccgatggttgatctgggattcgcgccgatatgttgacgactgtgtgagatgcgattgcttcgtcggagaatttcgctttgttggatacggcagttgtgttgcacgattcggactgttccgatgcatactgttcgccggtttcgtctgtcacctgttctttaccgccgtaaggcagggtggccatgacttcaaagcctccgccgagttgagggccagcctgcaacgagcctctggccgattcgatgcgttctttcatgcccagcaggccgtaacctggcgtatgcccgtcgatattggctgccgcgccatgaccattgtcggtgatggtcaaagtgagcaaaccgttgttccatgactctttaatgtgcacatcgacgtgtggccccgcatacttgcggatattcgtcagcgactcctgcactacatggtaggaagctatcgaggcttgttcgccgagttgttccgggctggcggtgccggtgatattccgtcggattcgaatgtcgggggagacgttttgcgcttgttccacaagattgccgatatcgttataatcggcgtgcggtgaacctccgaatactcccagaagacgttgcatgtcatgcagtgcgcgttccgattcgtgtcgaatcgtctccatggtgtttctggccaccgcgggatcatgcgtgcctgcataacgaccgccatcagactgcacgatgatgattgacagggtgtgcgctaccacatcgtgcatgtcacgtgcgatgcgtgcgtgttccgccaacgcggcgatatcgcgttcatcctggtctcgcgcggcgattgcctcattgcgttcccgcatcatgcgaatggttgccagacgggcacgctgccagaacgctacaatgacggtggaaatgatacatacttcgaaaatcggcgtcagcaccagcatggaatgcgccaccatgtcggcgacttccgatatggatgttcctgtgtagatggaaccgagagtgtcttccgtgaccataacgccatttggatttgagtcattccagctgctccatgtatgcactttgcctccggtgagcagtggtccattggtcatggtccatgccgccagcgccgcagccagaagaccgatggtcaacgccagaataatgaaggctttcgtgtttttgggattgccgtagacgatcactgaatacagcatgaacaatgccagaatatcggtgcccaacaggcaggggccgaatatgagatgcgccaaggtcaatgccacgcagagcaacgctccggtctgtggccaccatcgacggattagcagcggaataagcattgccgcttcccatgtcatctgcgtggaaggcttaaggtcaaacagcaatcccggattataggtgatgccgctggtcacgccgaacagcagaacacctataacaagcgtgatgatgagatcgcctgcgaagacatgaccatgcatccacgacaagagacgctgcttgaaattcgacatatgctccaccctagcgtcagatatgctgtgacgccatcatgcgcaggaatgaaatagcggtaaggtaaagccgcttttgtgaggtaaggttgtccccgcatgtgggtgagatggaagccatcaaaaagtcactactcgcattgaatatgctgatgacgccaaaggaaaggtgaatgcatgacgttgctgagcgaatactacgtgcccggattgcatattgaggatcgttccatcaaggtgccgttggattggacgggtcacgagcccggtcatgggttcgatggcgaatcgattagcctgttctaccgtgtggtcaccgctcccgaacatgtgcatgatgatctgccgctgctcgtgttcctgcagggtggtcccggtggttccggtccgcgtccgctcggtccaagttccgatggttggattgaggaggccatcaagcatttccgtgtggtgttgccggatcaacgtggtactgggcgttcgtctcgtgtcgatacgcatgtgattgagggcatggatggcgacggcaaggccggtgccgcgtttttgaagcgtttcctcgctgattcgatcgttcgtgacttcgagcatctgcgtcgtaccgaattcgggggcgcacgttgggtcacgcttggccaaagctatggcggattcctgacgttgacgtatctttcgctgttcccgcaaggggttatcgccagcttcactacgggcggcattcctcatgttcccgccgatgcgaccgacgtgtaccgtcatacgttcccgcgcatggcggcaaagacgaagcagttctacgagcgctacccgatcgatatcgaacgtgccgctacggttgccgacatactgcgatctcgcaaggtcacattgccgaacggcgatccgcttacggtggaacgtttccaatgcttgggatccgatttcggtatgaagccaagtttcgaacgcgtgcattggattcttgatcaggcattccttgacggagacggttcggcctcgacatcgacggaactgtctgacgaattcctgtcttccgtgatggatgcgacctcgtctcgcccactgtattggccgttgcaggagttcatctacgccaacggcgagctgaaaacgccgattcgctgggccgcccagcgcgtgcgctgtgagcatccggaattcgcgggtgacattcgtccgcttaatttcaccggcgaggccatgttcccgtggatgttcgagcaggaacgtgcgttgcgtccgttcaaacctgccatggacgtgcttatggaagacacgcacttcggcacgatctacgatgccgaccagttggctcgcaacgaggttccgctgcaggccgccgtctattttgatgacatgtacgtcgattcgggattgcagctcgacacgctgtctcgcgttggtcgttcacattattggactaccaatgagtttgaacatgatggcgtgcatggttccaccgtgttcagacatctgtttaccgaggcgttgaaccgcggagatttggcggagttgttctgacgattgttcggcaacgacgagtatcgatagcaaaggaaagaaacatggccaatccaaccatcggattcatcggatacggcaatatggcacaggcgatcgccgaaggcctagtcaacgctggcgtcgtcaatggcggcgacatcgtggcctgtgccgcgcattacgacaagctggaatgtaacgccgccaaacttggtgtgaaagcggtgcataccgctgcacaagtggccgaagccgccgacgtggtcgttatcgccatcaaaccgtatcagattgaagcggtgatttcaccgattgttgataagctggcgcagccaaataccatcgtcgtgtccattgcggcaggctgggatttgaacaaattccgcgacctgttcggaacgtctttcgaacaggcacacatccaatgcaccattccgaacacgccgatggctgtcggcaaaggcgtgctggtcacggaaatcgacaacacgctcacgcaggaacagacggaaaccttcgaaagcctgttttcgtcaatcagcctgattgaacgcgtggacaccgcacgcatgggcatcggcatgtgcatcgccggctgcgcgccggccttcaccgacatgtacatcgaagcattgggcgatgccggtgtgaaatatggattgcagcgtgccaccgcatatcgtctggccgccaaaatggtggaaggcgtgggcgcgctctatttggccaacgaaacgcatccgggtgccatgaaagacgctgtctgctctccagggggcaccactatcaggggtgtcgcatcgttggaggaaagcgcgttccgtggtgccgtgatcaaagcggtcgacgccatcgaagcctaatactaagctagggaaccatgtctcttactatcggaatcgtcggactgccgaacgtcggcaagtccaccatgttcaacgcattgacccgtaacaacgtgctggcggaaaactatccgttcgccactatcgagccgaataccggcattgtgccgttgccggatgaccgcctgccggtgctcgccaagctcgtgcacacggagaagatcgtgccggccaccgtcacgttcgtcgacatcgcaggcatcgtcaaaggtgcttcggaaggcgaaggcctgggcaacaagttcctcgccaacattcgcgaagccgatgcgatctgcgaggtcgtgcgtgccttcgaagacgatgatatcgtgcacgtcaacggcaaggtcgatccgtccgacgacattgaaaccatcaacaccgagctgatcctcgccgatctgcagaccatcgagaacgcgctgccgaagctggagaaggatctgcgcggcaagaaaatcgaaccggcctacatggaagccgtcaagcaggcgaagaccattctcgaagccggcgaaaccattgataaggcggctcgcgaaggtcgtttcgataaggattccgtctacgatctgcacttgatgagcgccaagccgttcatctacgtgttcaacgtggacgatgccgaactgcagaacaaagacatgcaggccaagctcgccgcatccgtggctccggctccggccatcttcctcaacgcgcagttcgaagccgatctgaccgaacttgatgaggcggacgcgcgcgaaatgctcgccgacgccggtcttgaggagtccggcctggatcagttggcgagagttggctacgatacgcttggcctttccaccttcctcaccgcgggcgagaaagaagtgcgcgcatggcagattcacaagggctataccgctccgcaggctgccggcgtgattcacacggacttcgaaaaaggcttcatcaaggccgatatcgtctcctacgacgatttcgtggctgccgaaggctccatggtcaagatcaaggaggaaggcaagctacgtcaggaaggccgcgactacgtgatgcaggacggcgatatcgtcgaattcaaattcaacgtttccaaaaagtaagtgtttctctggctcccctctttgaggggagctgtcgctacaagcgactgaggagcggcacggataaggcctgagaagtcgtcttctcaggcctttgtcatgacattgttctgcaaggactggctgctgcggcagcataatgtgtgttttattattcggccttggcggcttgctggtcaatccaattgttaacgtcggtgaccgcctcgtcaagggttgctttggcgactttgtagtatttggaatctacaggttgacgatttctgcgccgaacggccagagtgcgagcttggccatcttgaacgattgcagtccgaacggaataccgataatggtgatgcagttgagtacgccggctcccagatagccgagcgccatccaccagccgaccagcaccacccacaggatgttggccaaggcagagccgactccgccgccgtattgcacggttttgccaaacggcgtcagggtgagtcccgccatcttgaacgcttgaatgccgagcgggatgccgatgatggagatgcacagaatcagtcccaccaatgcccatccgattgcgatggccaatccaccaagaatgatccacaggatattgccgagaactcgcatgattagtccctttccgattccggtcgatgcctcgcatgttcagcttcactattttgccagacatcatgacggaaacacgagacgcaacccttagctcgcccctgattcatccccggaccgttattcaggcgtagcgtatgcggtaagcccaatcctcttgtgaagattttgtgtattgttgagcatgcgtgggtttcaccgtctatttgaatgatgataggcttctcgatacctgccgtacgaaaacccatcaaggagatgccatgaacctgtatcgctacgcgatgttcatcgcacgcgcctgccgtgggtcgttcatcggcaatgttctgtttgccaatccacaaatggccctattctcgatgctggtgtagcggggacacgccttatgccgggatgtaccgatggcccatccgcagtcgacgtcgcatgaatcgctcaccatagccatcaacttacgcaaagccgcgaatcgtttgccgtatatgaatgcggaacggatggcggcttttcctttaccccggactcatcggtgtcctcgcgtcttgacacaagcatggggccggatcgcccacacatgccgttaccaacagaaggaaatgctgtgacctcacagaaaaacgcggaactcgggtccgccgccagttccgtaaagcctattgatccgcacacccgattcatcgtcgtgggtgtgatcgtcgtcggctcgttcatcgcgctgctcaaccagaccgtcatgtcaccggccttgccggcactgatgcgtgatttcaatatcaccaccggcaccgtgcagtgggtgaccagcgtctacatgctggcctcgggcatcatggtgccgatttcaggctatctgattgataaattctccacccgaaagctcttcgccggagctcttgccactttcatggtcggcacactgctgtgtgccgtcgcgccgaatttcatgctgttgctcgtcggacgcatactgcaatccgccggctccggcgtgctgttgccattggtcgccgtagtgccgatgctcgtctatccgccggataagcgcggcaccgccatgggactggccggtatcgtcatggccgccggcccggctatcggcccggttgtcggtggtctggtgattgacagtttcggatggcgcccgatgttcattggcatcgcagtcgtggcactggtcatccttgtcggaggcacgatgatgctcaagaacgtcagcgagttgaagaacccaaagctcaacatcctgtccgtgatcctttcgaccatcgcgttcggtggcctgctttatggcttctcgtccgcttccacgatgggatggagcagtccggtcgtcattacctcaatcgtcgttggtcttgtggccttcgtcgcattcgtatacaagcaagtcaagctcgatgagccattgttgcgcgttgatacccttgccacccgcaacttccgcaactccgtgattctggtcactctgatcaacgccgcagtcgccgcaaccaacgtgacgttgcctatcttcatccagaatgtgctcggccaatccgccaccgtcaccggcatggtcatgctgcccgccgcggcggtcggcatcatcctgagtccggtcgccggcgccgcattcgacaaattcggcccgcgcggcgtgggcatcggcggccttgcgctcatgaccatctctcttggtcttctcggcaccatcaacaccaggacatcagtgctgtttgtcgccgtgttctgcgcattgcaggcatccggtcaggctatcgccaacatgccgatcaacacttggggcgtcaacgctttgccgaacgacatgatcgcccatggcaacgccatcgccaacaccggccgccagatcgcggcagccattgcgacctcgcttctggtcaccgcagaaacatccgtgaccgcctcgcacatgtctcagggtgtgaagtccgccacggccagcggcatcgcgttctcctacctgctgtgcgccgccatctcgctggtcgccctgatcatctgcatcttcaccgtcaccagccgtgccaaggagaaggccgcacgcaacgccaaggcctccgaggcgcaagcctccgccgaagtcgcggccgaaaccactgaaggccagcccgccgagcatcactacgccggcgcatacgtggcccccgccgcctccctgttcaagcaggcccaggaacagtccatcggcgggatcatggacgatcagccctacagctgcctggacagcgatgacatcacgcatgtggtgcgcgagttcatccgcctcaacgtctccagccttcccgtggtgaacggcgatggcaggctcgtcggcttcgtcagcgacggcgatgtcatgaaatcgattgccacctatgaatcccgtacggtttccaccggcaccggttcgacgatggtggtgttcgacgacgaaaccgtggcctccaaggtgcaggcgctctccggcaagaaggtgatggacatcgccacgcgcaaggtcgttgccgccacgcccgaccagcatgttggagaggtggcccgaatcctcgccaagaagcagttcaagaaactgccggtggtggatggtgatggcagactcgtcggtgtgatccgccgtaagtccgtgatggaacatgccttcgatgcgctgttcccaaaggatgatcggtgattcggcgtcatcatcgctgaatagaatgaatggaatatgaggcttcccttctcgcgggggaagcctcattgctttgtccgcgtatggtatgccgacccgaccccgcttcgttggtgtgcatgggatgtccattcaggtttttcccatcttcggactcgtaaaataggcgaggttaacaagacgaagaacgatgacatccgtcgattcgcaaggggtggacgcatatggattatcagtatcaggccgttgaacagccttccaatccccgcaaaacctggccgattgtcttttccgtggtcgtggcgctcactgtggcatgcagcgcaggagcgtacgtctaccacaacaaacggcaggaggcgttggacacatgccggcaatcgcttgcggaattcagctcggcccgtaaggccgtgctcgacacatccgaaaacggtagcgagctgcagaaattgatccgtggtgcgctcggcgtgaacgacatcatcgacgcgttcgcggacgcggctaccagcgcagagaacacggtcgatacggaaggctgtaaggcggacgccaccatcacgcagctcaatctcatcgccaaaacactagacagcgccacggactccctgaataacagcctgaaggacatccgggagaagaacggcacgaatgcgctgcaggattcgcggaacgattcggatggcacgacaacgaacggaccatcctccaatactcagtccaatacgtcatcggggcaattgctcgacgttccttcgaacggttcttccgccacggaatcgttggatgaatcgaagaaggaactgcagcagtcgctcgacaaggcggacaaattggtcaacaagcttggcaaggacgaaacactgacgttgactggccgtaaactgctgtccgcattgtccaaagctgtggattccggtcaaaaactcattgaaaacagcaatatcaaggattccaagtactacaaggcagccaaagtcacgctcgatgaggccatcgatgtggccgagaattgggtggacagacaggcgtccaaagcgcaatgacgattctccctcgtgttgcttccatacgcatgtctaaagtttcccggaaaaacgtcgacgattatgacatcagagaatatgacgccatgacggatggaagcgtaagaggggatacgaatgacgaaatcggggtgtgggccgtcgggaaacctcgcgtttgcgaacccggtcgcccgtccatatcctaggcgatcgggttcgcaagaccgatcagaagaacagcgctgagactccggccgcaaagcacatcagcagcacagacgtgatgaaactggctaggaatgccttctgccccttcttggcgatggcgctgaaattcacgttgatgccgagcgcggccatggccatgccgagcacgatgtacgcgaaatcgaccagattcggtgcgatggcaccgatgaacggcacgaacgtgccgatgatggaagcgccgatgaaaccgagcatgaaccatgggaacgacactttgcgtttaccgtccgctggcatttcggaatggtttttatcccaccaaacggcgatgacgatggctgcgaacaccagcatcagcactcgcgacagtttcatgatggttgcgatgtccaccgcgccgaacgcgtcgccggccgccacggcatgggcgatttcgtgcaaggaagctccggcggtaatgcccagctgtgtcttactcaaaccggtcaatggtccaagggtgatttccagtaacgcgaagatggtgcccatgatggcgatgatggccacggccattacttcgttgttggctttttcatcctctttttccggcggtactttgatggagccagacaatcccatgacggcggccgcaccgcaaatgccggtgccgcccgccaccagaatggcgagttgcgggtcgacgccaaatttgcgggcgatggcgtagcacaccacgatggtgagtgtcacgaccacggccgcgatgggcagacacttgatgccttgggtgaacaatacggtcagattgagcttgaatccgagcagaatgattcccagacgcaacagtttattggaaataagtcctgctgcgtccttcacgccggacctgtgttccacggaacggctggaataccatttgcgaatcggaaactggaccgccatgccgatgagcaatgcgatgatcagcgcgccgaacagactgaatcccggaaactgtttaagccacgaagccactagtgaggcggccaaagtgacgatgctgacgaaaaccatttccttggtggctatgcgagcccaccatgttttgcaaaaatcaatcacgtgtctcaagtgttccggccggttcggacatcggtatggtgcagaaagcgataacttcagcgccgtgccaacgatactgaaatccaatgcgcgatcggcagcaggtacaggaacactgccaatgtcagactggacgtgggcgctcccaccgaagcgagcggcaccgctccggcgatggaccatggaatcagcggagccaccaccacggcggtatcctccagattgatggccttgcgatgctcgtcggactccagatggtcgcatagctgatttgtcagcatgatcgacaacgtttgattgcaggcgacggcactcgctacgagagacgttaccagcgtggcgccgaatacgctgatatgccgggcaagcgatgcgaccatccgatgcgcgccatccagcagttccgtctcttggaaaatgccggaatatgacgatgaaatgcatacgatcagcatcactttgaccattgaaacgattccgccaccatcgatcagcggtgcgacgcgcgcgtcagcacagtggaatccgaataccagtgcgtggccaatcgcggtccaatccatatgttgtactgcaacgcaaatcggcaatgcagtcagtatgctggcggtcatggtgatgcgcacgtcaaccctggcgatcgtcagcgcgaccaacaccactgcgggcaggacggtgacccaatcaagatcgaacgcgttggaaaacagtccggcaatgtcaatggagctgttggaaggatgcgtgcacagcgtcaatgccgcatacactgcgcacgtcagcacgaacggtaccgcggcggttttcaacatcagtcggatattgtcgaaaatgttcgtgcgcgtcagcgttttgaccaattgggcgctggtggatacgggggagcagcggtcaccgaaatagatgccggacagtatcgctccaccgaggaacaccggtggaacctgcatggaagtgcccaacgtcatcgtgatcacacccatcgtcgcggccgaagcgaacgatgatccggtcagcagagacatcagacagttgagtaggaacgtgagtaggaccaccacatgaggatgcaccagacctgccgtattcgtcacaatgaacgacacagtgcctgcggcgcgccacagggtggtcagcaggccgatcagaacgaacgttactaccacgatgctggctgcacgcatggtcgcgaaacctttggaaatcatggcggtgaacgtatgcccggtaagacgcccatgagctaggaagatcaccacgccggccaacaacgccggaataatggaaatgccggcgataatgcagacgatcaacgcaccacagaacaacgccattgtgatgagctcggccatggatacacgtccttccttcataggtgccatgcgaaacaccgcaccagtgaacccgattggcatggttgatgcgtggactgtttcgatatatgactatcggtgtggcatgtggccgttgcgctgcgtcggtttgcttcaagctgacttgaagttggtaatctggctctggaagcaaaatcgaacagaataaggagaattcatggctgatttcgaagcaaggaagctggacgaattggatcatcgcactgatgatgcctccgcgcccgaagtgttcttcacatctgtgatcacgccggaaagcctgatcggagcctatcatgcgctcggacgcaagcctcaaggcaacgtggccattaaaatccattccggcgaatcggcgaaatccaataacctcaatccggcgctcgtcaaggatctcgtgcaggagatcggcggcacgctcgtcgaatgtgcgaccgcatacgatggcaatcgcgaaacgcctgagaaaagccttgccgtgttcaaggaacgtggatacgcggatatcgcgccgatccaaatcatggacatgggcggtgaaatcgaaattccggtagccaagcaccgtcatatcgcctatgacatcgtcggcaaacatatcgacgactatgattccatcttcgtgctctcgcatttcaaggggcatccgatgggcggcttcggtggcgcgctcaaaaacgtgtccatcggcatcgcatcgtcgaacggcaaacgctggatccattccgcgggcgtggccaccgaccactgggtggaaaccgaccaagatgacttcctcgaatcgatggctgaagccgacgaagcagtgatcagccacatgcatggcaacatgatgtatctgaacgtcatgaaccgcctatccgtggactgcgactgcttacccatcccatccgaaccggacatgcacgatatcggcgtgctgtcatcgcttgatccggtggcgctcgatcaggcatgcgtggaccttatccacgttgcccccgacggagcttccgtcaccgaacgcatcgcttcccgccacggcgaacacacgctcgaatacgccgaagaactcggcatcggctcacgctcgtaccgtctgatcgtgctcgactgacagtgtccgtaatgaccacgaaaccggcgggaacaggcggtgtcgtaatcgcccatattgaagcgctgcttgccgaacgcgaccatgtgctcgttgcgatagacgggccatgcgcatccggcaaaaccatgctcgccgcaaccgtcaacaagcgtttcggcggcaacgtgctgcatatggacgatttttttctacgtcccgagcagcgcacgccggaacgattcgcgcaacccggcgggaacgtggaccgcgaacggttcgaaacggaagtattgactccgcttctcgccggaaaaaccgtgcaataccgtccatgggattgtcattcgggcgatttcgcggtctctcgtaccgtcgaaccggctcggttgaccatcgtggaaggcagctacagcatgcatcccgatctgcgcgggtactacgattgcatgatctgtcttgcgattacgcctgctgagcaactgcgtcggcttgagcaacgtaatccgcgcatgctgcgacgtttcgtcgacgagtggattccgttggaaaaccgttatttcgaagagaccggaaccgaatcggctgccgacatgatcgtcgacactgcattgccggataacgtatgacgatcattgaagagaagaaaacaaaaggagaatgaatatgtctgattctgcaactatgtccgtgcgcgctttacatcgtaccgacctgccgaagctgagcctgagcaccaaagccgcggccaccgtgttggccattgtggccgcggtcgcattgccgcagctgttccatgtcatcggtgccgtttccgggcagggcaccatgcttggcgtagcatttctgccgatgcatctgccgatcatctttgtcggcctgattgccggtcctgccgtcggcgccatcgccggagccgccgcgccgttcgccagcttcctgctgtccggcatgccgatgctggcgatgctgccgctgatgatggtggaattgtgcgcgtatggtcttgtggccggtctgctgcgcgaagtcaagctgccgagtcttgcgaaggtggtcatcgcccagctggccggccgtgtggtgctgaccgcggccactgcgatcgctgtgttcgcgttcggctcaagcaaggcggtcgccgcaacatggacgagcgacctggccgccggtctgccgggactcgccttgcagtgggcgctgatcccgctcgccgcctactggaccgagtcgctgattgccaagcgcaatcactgaacaacgatagttcaaacgcggcagtcaaccacgttctgaacaaaaccgatattttcgggagccaagccattacgcttggctcccgttgtcatatcagtcgggaaatcgggagaaacggtcatgatcgcgggagtgtccatcaccacattgctgctggtgctcgcagccggcatcggggcgggattcgttggatacgcggtcggcgcatcctcgctgatatcctatccggcgttgctagcgttcggcattccgcctgtgctgtccaacaccacgaacacggtgggcgtgtgcggtacgggcatcggcggactgctttccgcccgaaaagagctcaaaggccaaggcgtgcgcgtggccgtctacgcctgcatcggattggtcggtggcattatcggcggactgttgctgctggaactgccggcaaaagtgttcgaatgcgcggtgccgccgctgatcctgttcagcgcgatcatcatcgcactcaatccacggaagaaggcggccgcgcgcgacgccgtggcgcaggcgctgccgcaatcgcatcaaggcgaacgagccgcgcggatcgccagcaaaaccgcaagtggcacgttgcgcaacgatccgtggtggctatggcttggcgtgagtttcgtcggcgtctattccggctatttcggtgcggccgcgggcacgcttgccttggcgatcctagatttgggtaagatcggcccgttccaccagatcaacgcgctgaagacggtagtcgggttcggtgcgaacatttctgcagcagtcatgttcatcatccgtggttccgtcgattggccgttcgccatcatgatgtgcctcggttgcacgatcggcagtgcgatcgcaccacccgtcacccgccatattccggagaacatcatgcgcgccgccgctgtgctcaccggcatcatcctcgccgtcaagctcggctggtccacctacctgtgacatgcgctgtacattgattcgcaaggtgaagtcccgctggaagaaccggtttctccagcggatttctttttctagctgccttgcgattgaaggacctgcgagccgtccatcggtatctcgcaaaacagcatcgtgtcagataagcgtcgacagcgctcgcatgacgatgtccacgtccttgttttccaattcgcgaatgacatgcagataggtttcctgtgttgtggtcatgctggcgtggccgaggcggcgcgacacgctggcgatcgatacgccggcgaacagcagcagtgatgcgtgcgtatgccgcaatccgtggatggaaatgactggcacatccacgttcttgcaatgtctggcaagcacgtcgttggctgtggaattatagactttgccgtgcacgaagatgggtttgtcatgcggaagattcttgagcagtccggaaagctgcatgatgagctgccagtcaagctgcactttgcgtacggaggattcgtttttcgtgggtacaaaaccgccgccgtttttgtaatcccaggttttgctgacggaaagcgtttggtgggcgaaatcgaagtcgtcgggcgtgagcccaagcgcttcggagaagcggagtccggttttcgcgatgaggagaatgagccaatcccaacttgcctcatcgccaagatcaagatcagcgagcatagcgtgcagctcgaattggttgagatacttcatttttttgatgcgtggctgcttgcctttgataatgactttgcgtgtcggatcacggggaatgagtccttcatcaacggcatcgagaatggcgcctttgatctggtgatgaaaatccatggtggtctggcgctcatgatgctgcgcgtaaccgttaatgagctgctgataggcggtacgatccatatcggcaagtcttagttcagggatgagtttgccgatccaagattgtgtgagtcgatatttacccatggtcacgtctctgatggcaccttccttatacgttctcacccactgggcgtagtagtcgcaaaacagcgattccgaagtgatgttttcctgcatagtgtgcacctttctaaaaaagataggggataaggtgcagccatcatacttacgctgatgaagggtgatgaggttgtcgagcttggcaaagaattggccgatttctttttgctctctaccgcctgggacagtgacttctgcactcagtaagtccttattgtaaagtcgcttaatcgtgctgccctctaagccccattcaattcgcgagtacaaaggcttgagaaacgcatcgttcaatctatgatcatgttcgagccaaacaatgtttgagtcttgaaaatatgccttttcaccttggtattcaacaacccgtccaatactacctgcagccgatatcaataacgtacccggggttggatacggataaatacatttgaagtcttcaaacagctcgttggagatgaaggcatctggattcgcaccaaaagttccaatcttaaagaacggaacatcaccctgctccgaggtctgctctttgtaaatgcgcttgcacatggcaacagaaccaaattcccccagcttacgctgttcccaagcgggggcgcggtattcttatggaagatgtgcagtcactcgtggagccgtgcattggtttgccggtaccgcaatgaggagggatagatgaataagcagcagctcgcttcgaagatttgggaatccgccaataagatgcgttccaagatcgaagcgaacgaatacaaggattacattcttggcttcatcttctacaaattcctttcggaaactgaactgatgcgcttgaaagccagcgacttcactgaggacgaccttccgcagctcacggaggacaatccggacattgtggaattcgtgcagggtgagtgcggctacttcatcgcctatgacaacctgttttccacatggattaaacaaggtaacgatttcgagatttccaacgtgcgtgatgcgctttcggcgttctcccgcaacatcaatccggcgcacaagaaagtattcgacggtattttcgacactctacagaccggactttccaagctcggtaccgatgcaagaagccagtccaaggccgcgcgagatttgatttacctcattaaagacattccgatggatggtcgtcaggattatgacgttctcggcttcatctacgaatatctcatcagcaatttcgccgccaatgcggggaagaaggccggcgaattctacacaccttctgaggtttcccagctgatgagcgaaatcgtcgcctggcatttgcaggggcgcgagcagatcaagatctacgacccgacatccggctctggttccttgctgattcatattggccaagctgtggctcggcgcaacggcaatccggattccatcatgtattacgcgcaggagctcaaggagaacacctacaacctcacgcgtatgaatctggtgatgcgtggcattcttcccgacaacatcgttgcccgcaacggcgacaccttggaggatgactggccatggttcgacacgttggagaacaaggaggaaacgtacaatccgctgttcgtggatgcggtggtctccaacccaccctattcgcagaattgggatcccactgacaaggagatcgatccgcgtttcagctatggcatagctccgaagtccaaggcagattatgctttcctgctccacgacttgtaccatctgcgtgccgatggcatcatgaccatcgttctgccgcatggggtgctgttccgcggcggcgaggaaggtcagattcgtaagaatctgatcgagaaccgtcatattcaggcgattattggtctacctgcgaatattttctttggtacgggtatccccaccatcgtgatggtgttgcgcaaaaaacgcgatgacgacaaggtgctcatcgttgatgcgtcgaaacatttcatcaaggacggcaagaacaacaagctacaggcttctgatatcaaacgcattgtcgatgtggtgtcgaacaatcgcacggtacccaagttcagccgtctggtgtccatcgatgagattcgcgccaacgattacaacctcaacattccgcgttatgtcgattcatccgaggatgcggaaatgtgggatgtgtacgcttcgatgttcggtggcgttccgaagaacgaggttgagcggttcaaggaatattggaacgcttggccgagtctgaaggctgaactgttccgtgataatggtgcctgctatgcctgcgatcacgatgatatcgccactgtggtgcgcaacaatgccgacgtacaggcgttcattgcctcgtatgagcaagccatttccggcctgcctgctgacctgcgctcccgtttggtggagcatcccgaacaagtggatgcgctcgcccaggaaacggccatcggtaaggaattggatgcgatgattgccgataccgcgctggttgacccgtatgatgcttatcagaagcttgatgacgcatggaacggcatctccattgatctggaagtgttaggttccgaaggtttcgatgtggtaggagccgtggatccgaacatggtcgtcaagaagaaggccggcaaggatgtggaagtgcaggatggctggattggccgcgttctgccgttcgacctggttcagcgcgagctgctgcacgatgatttggccgcaatcgagacggacgaacgccgtgtgcaagacatcgattccgagattgaaaccatattggaaggtttcgatgaggatgacaggcagaacagcgatgcaatcaatcaggacggtgacgccttcgttgccgccgagctgaagaaagcggtcaaggcgatcggcaagaatccgtcttccgacttcgagcgtggcttggtgcaggcccagaagctactcgatgaggcgaagaagctgaaatccggcatcaagaccaagcgaaacgtgttggaggagaagacctacaacacgattaaggcattgagtgatgacgaagccagaaggttgctggaagccaagtggattacgccgctgcagaagcagctggaagcgctgccgaatgcggtgatcgacgaattcattggcaaagtgaacgcgttgaagaacaagtacgccaccacatatgccgatgtatgcggccaaatcgatgaagcggagagggaattggccggaatgcttggcgatttgaccggtaatgcccgcgatctggcgggcttggaagagctcaaatcactgctcgggggtgaataattatggtcgaacagcatgaaaaaacactagttccgcagattcgtttcgctggtttcactgacccttgggaacagcgtaagctgggtgaactgttcgaggaaagtgatgaacgagcttccgatagagagattttgtctgtcagcgtagccaacgggatatacccagcatctgagtccgatagggagacgaatcctggcgcgagtctcgcgaactacaaaatagtgcatttcggagatgtcgtttacaacagtatgcgcatgtggcagggggctgtagatgcaagtcggtacgacggcatcgtaagccccgcatatgtagtagcaaggcccaattccgaggtttatgcacgattctttgcgcgccttctcaggcaaccgatgttgctaaaacagtatcaacaggtttcgcagggcaattccaaggacactcaagttttgaaattcgatgactttgcttcaatcggaatttctatgcctgtctcagaaaacgagcagcgccaaatcggcgggttcttcgaccgtctggactccctcatcacccttcatcagcgtaagtatgacaagctctgcgtactgaaaaaatccatgctcgacaagatgttccctaaggggggttccctgtatccggagattcgtttctctggtttcactgacccttgggaacagcgtaagctgggtgaactgttcgaggagcattccgaaaaagatcgagacgatttgcctgcacttacaatcattcagggcggaggcacagttcatcgtgacgagtccaagcgaaacctccagtttgatagaagcagtctttcaaattacaaagttgttgatacaggagattttattgtccatcttcgttcgtttgagggagggctcgaaaaggctacatgctacggtttggttagtcccgcttatcatatcttccgtggcaaaaatgtcgattctgatttttattatctctatttcagatcgaagcgttttatcgatgtggatttgaagccgcatgtttatgggattcgcgatgggcgaagcatcgacatcgaaggaatgaaaacgatatttatcccatggacgaatttagctgagcagcgccaaatcggcgcattctttgaccgtctgaactcgctcatcacccttcatcagcgtaagctcgaattactccggaatatcaagaaatccatgcttgacaagatgttcgtataggggtgttcatggcaacaatcacgttatttcacggttccccgcatgagtcagtgacccccgagtatggtttgggtaacgacaagcatgactacggtcgtggtttttatctgactaaaagtgtcgagctcgccaaggaatgggccgtgtgcaggccggatgagtccaatggctgggttcaccagtacgaactggacacgaatgggctgcgcatcctggattttcaggaacataacgtgcttgcctggctggccgagctgatgaagcatcgtgatgccgccgattccaaacgttatcgcgtgcttgccgcgaagttcatcgccaaatacggcattgaaaccagcagttatgacatcatcaaaggttggcgtgcgaacgcctcgtacttctacatcgctaaagaattcgttcgagataatgtggacgtcgatatcttggaggaactgctgtcgcttggcggactgggcatccaatattgcatcaaaagcgaaaaggcatatgggcaactgcgagaagtcaacgatggcttgctttccgtcagttacagcgaattcaacgacaaatacaatcacagggacgttgaggcgcggcagaacatgcgtgatcttatcgattccgatgccaatacggtgaccaacgtgttcagcacgttgctctaggggtgatgacaatgcaggcatatccagaggtctaccgggatgatgtggtggaaagccaaggcaagcttttcgactacgtggcgcagtcgttccctgacaagagcacagaggatttcatcgccacgtatatgacgagcaaaacacgcaaaagcattgatgaagccaaagcctacgtcaatacgatggatgcggaagagctgtggaagtatttcaccgagaccgagcattaccaattgaaggacggcaaggcgcttaaagggttcatgcccgattggatcggtgagttctatgcctactaccaatggttctacggtattcccagttctgaagtgatcaccagagtgccgttggacttcctgaagaaagcctatttcgggctgcatgatcttgatctggaacttgcggtgcggaaagtcggcgaggaatgacaggcatcgtctgcttccataatcccgatgaggagaacgggtacctgagcaactggtatccgtcgcacttcgttgtgaacggtgtcgggttctcctcgatggaacagtacatgatgtaccgcaaagcatgctgtttcagcgatgtcgaaacagccgcgcgaatcctcgaaaccgatgacgtggccgagatcaaacgccttggccgactggtggccggttatgacgatcacgtgtggaacggcgttcgccaaatcgaggtctatgaaggattacttgccaaattcagccagaacgccgaacttggggcacggcttgaggtaactggcaccgcgctgctggcggaatgcgccgtcaaagaccgcatctggggcatcggcctgtcgatgcatgacccagccaggctcaatccgagccaatggcgcggtcggaacctgctcggatacgctctaatgctcacacgaaggaagctcagccgtatagattgatggtaatacggctgttttccgggctctaattgtccccgcttgggaacagcgtaagctgggggaatttggttctgttgccatgtgcaagcgcatttacaaagagcagacctcggagcagggtgatgttccgttctttaagattggaacttttggtgcgaatccagatgccttcatctccaacgagctgtttgaagacttcaaatgtatttatccgtatccaaccccgggtacgttattgatatcggctgcaggtagtattggacgggttgttgaataccaaggtgaaaaggcatattttcaagactcaaacattgtttggctcgaacatgatcatagattgaacgatgcgtttctcaagcctttgtactcgcgaattgaatggggcttagagggcagcacgattaagcgactttacaataaggacttactgagtgcagaagtcactgtcccaggcggtagagagcaaaaagaaatcggccaattctttgccaagctcgacaacctcatcacccttcatcagcgtaagtattgtggtgttgcgtcttggatgttaggggttgcgctcgtaagattgggctcagaaagtgacggtgcattcggggagatgaaacatgttctacgataaagaatcggatttcgaagacgatctggtcgcggtactgaagcgccatggatggaccgatggcgtgctggaatacccaaccgaacaggaccttatcagcaattgggctaacatcctgttcgacaacaacaaaggcattgatcgattgaatgggcagcgccttaccaaaggcgagatggcgcagatcctcgaacaaatcgaaacattgcgcacaccattggcgctgaattccttcattaacggtaaaaccgtatccattaaacgtgataatcccaaggatgaggctcattacggcaaggaaatcagcctgaagatctatgatcgccaggaaatagcagcggggcaaagccggtaccaaatcgcaagacagccgatgtatccggcgaaaaacaagatgctgaacgatcgcaggggggacgtttgcctgcttatcaacggcatgccggtcatccacatcgaactgaagaaaagcggcatccccataagccaggccaccaatcaaatcgccaaatacgcgcatgaaggcgtgttcaccggactgttcagactcgtacaggtcttcgtggcgatgaacccggacgatgccgtgtacttcgccaatcccggtgaaggcgatttcaacgacgattatttcttccattgggctgattacaacaatgagcccatagcggcgaacaagcatgtcgggcaggatgagtggaaacggttcgcgtcggacctgttgtccattcccatggctcatcagctcatcggtttctacacggtcgcggattccgcggacggatgcctcaaagtgctgcgcagctaccaataccaagcggtgaacgccatttccgaccgtgtccgcacttgcaaatgggacgagcctgtgccgagcggcactccgggccgaccgggcggttatgtgtggcacactaccggttcgggcaaaaccatgaccagtttcaaagcggcgcagcttgtcgccgattcgaaggatgccgacaaggttgtcttcctcatggaccgtatcgagctgggcacgcagtcattgctcgaataccgttcgttcgccgatgatgtcgacgatgtgcaaggtacggaaaacacggatgtgctcaaggcgaagctggcaagcatcgacccgaaggacacgcttatcgtcacgtccattcagaaaatgagcaacatcaaggccggcgaagggcatatcaccgaaaaagaggtgaagaaactcgcagacaagcgcatcgtgttcatcatcgacgaatgccatcgctccacattcggcgagatgctgcaggatattcgccattccttcccgaacgcgttgtatttcggtttcacaggcactccgatccatgaggagaaccgcaagaagggctcgaccacatcaatggtattcggcgattgcctccaccggtacagcatcgctgatggtatccgcgatggcaatgtactcggattcgacccgtacatggtgttgacctaccgagacaaggatgttcgccaggctgtcgcgttgcagaaggcgaaagcggcgacggttgaggaagcccaagcggatccggcgaaagccgaagtgttctaccattacatggatccgaatcaaatgccgatgggacctatggaaacgcaggccggagaacgcatcaagggcattgaggattacctgacttcggcacagtacgcgcagggcaccccgcatgagggcaaggttgtggaggatatcctcgaccaattcccattgctgagcaggggcaacaaattccatgcgatgctggccacgagttccattcccgaggcgatcagctattatcgcttgttcaaggagcgtgcgccgcagatgcatgtgaccgcgctgttcgatcccaatgtcgacaactccaacggcgcgattctcaaaggggacgcgcttcaggagatcatcggcgattacaacgaactgttcggcaaggatttcatcatccccacatggccgaagatgaagaaggacatcactgcgcggctttcccacaagcggccatatctgacgatcgatcagcatcgcgaggaacggctggatctgctgatcgtggtcgaccagatgctgacgggcttcgattccaagtgggtcaacacgctgtatctcgacaaaatcatcgactacgagaacattatccaggcgtttagccgcacgaaccgactgttcggctccgacaagcccttcggaacgatacgctactatcgcaagccgcataccatgaaagggtatatcgaagcggcggtgaaactgtattccggagacaagccgcttgatctgtttgtacagaagctgccggaaaacgtgcgtctgatggatgcgcgtttcgaagagatcgcttccgtgtttcgcgccgaaggcgtggaggatttcatgaagctgccggagtctgtggaagcatgccggaagttcgcgaagctgttctcggaactcaatgattttcttgaagccgccaaagtacaaggatttacatggcagcagcgggaatactccgtcacccatgacgatggttcggtggaggttgtgcggccggaactcgacgaacgcacatatctgattctcgttcagcgatacaaggagttgtttgctggagatggcgaaggccatagtgagggtcctgaggctccatacgatcttgatgggcatatcaccgaaatcgacacgggattgatcgatacggattacatgaacgccaacttcaccaaatggctcaaggcactcggcggaggagatacagccctgttggcatccgccgaggaggagctgcataagtcattcgcttcgctcagtcaggaggagcaacggtacgctgaactgttcatgcatgatgtggagcgtggcgagattgagttggaggagggcaaaacgctgcgtgactacattacgtattatgctaacaacgccaagaacagccaagtggagaagatcaccaaggcgtttggcgtggatggagctttgctcaacgagatgatgcggcttgatcttaccgaagcgacgctgaatgaatttggtcggttcgaccggttgaaagcgtccatcaacaagcctttggcaaaggcgtttttcagcaagccggatagctctgtcacccaattcactgcgaatcttctcgccaccaagttgctgaaaagctttatccttgaaggaggattcgatctggacgatcgtaaatagcggacggtagtaaaacagggggagaatcatgtcggttgtcgacgaagcaaaactggggtatctggactttctttcgcgtgaggatcgggtacgccaccatcgctacgttgaggaaatgaagcagtatgacatgatgcgctccggcgacatcaatgccatttcggaaagcgcgaaactgtgggattccggactatacggccatctgtcggacgatcctctgaaaaatgcgaaataccgtttcgtcaccaccattaccttggccacgcgtttcgccattgaaggtggcatggacgaggaagacgcatacaacgcctccgatctgtacattcaagatcttgacaattgcaagactccggaagacgtgcgccgactgcacaccgacatgatgaccttcttcacttgggccatggccgacatgcagaaaaccgacacccattccaaagccgtcaacgaatgcatggactacatccactaccatctgcatgagaaaatcactgtcgcgattctggcacagcacgtgcatttgaatcccacgtatctgtcggaactgttcgcgcgcgaaacgggaacgtcattgtcgcaatacattaccgacaaacgtatggaagccgccgaaaacatgctgaaatattcggaatacagcttcaatgagatcgcacagatcctcgcataccggtcgcaaagccacttttcgaaagtgttcaaaaaacatagcggcatgacaccgggggagtaccgcgccaagtattcacagaacggcatctggccggagtagtagcatctcggcgtgtcgcgggcgatgcggtgaaccggacgtaacgacatcgcgaacttcggttgtgccaagcgtgaaatcgatttggtttcgcgtgtggcatacgttcgaatcgactacggtgaaagcattcaatgatgatgcgcgccggccgaatgaacggcagaacggaaacgcgcgcaggatgtggatgaaagcaaaggaataaacgaatatgggaatgccccttgatttgtatgtgattcgacatggcgaatccgaagcgaacgtgattatcagtgccggtgaacagggtgacaactcgctgtatacgcaggacaacgtcaccgtgcccgaccgttcgtggaggcttacggccaccggccgcaagcaggcggactgcatcggccgctggctggtctcacagcagccgttgttcgaccgctacctcgtctcgccttacgtgcgcacgcgtgagacggctgccacgatggccctgcctaaggcgaaatgggaggagacgcgcgtgctgcgcgaacgttcctggggtgagatcaataccatcacgaaagacgatttcaaaaccaattacgcgcgtaactggatgttcaagaacactgatccgctgtattggcgtccgccggcgggcgaatcgatcgccgatgtggccgaaaaccgcgtgcataatctgctcacatccctgaaccgcaagtcggacgcagaatccgtggtgatggtcagtcacggcgacctcatgctggcgcttatgctcactttggaggacttgtccgacgaggaattcatgcaccgtgcggcgtccgacgaatggaagatcactaattgtacgtgcttccattattcgcgccgtgatccggcgaccgggcgtacgcataagcggttctgttgggagcagaccgcccgcccggtgttcgacgatgcggaaggtcgttgggcggtgaaagtggacgattggcgtgaattcaagcgtccagtgctgtcgaatggcgatttggtggacgttgttcatgcggttgaccgtcacctgtgatgtgtgttggtctgttgattgcatgatcggattggctgatatcgacgattgatgcccccatcttgcgtgcgcaacgcgcctgtgtccacgccccactacaatggctgtgacacgcggcgcgtttttgcttgccgcgaaagagagttaaggagacaatcgcatgtccaatctgttcacgtggcaggtccacggtgacggcaagacgctgaagccgggcgaagtcgttgagcctgacgagcgcctgacttggccgcgcaccgccgaaatcggcgcacagcatgtcatcgccatgttcggtgccacgttcctcgtgccgattctgaccggtttcgacccctccaccactttgttctttacggccatgtcgaccgcactgttcctgctgatcaacaagaacgtgctgccgagctacttgggttcgtccttcggcttcattgccccgatcaccgctgtcaccacggcgaacaagggcatcgccgtcgcatccttcggcattctcgtcactggtttgctgctggctctgatcggtgtactcgtgcacttcgcgggtgccaagtggatcgacatcatcatgccgccggttgtcaacggtgccattgtggccatcatcggtttcaacttggctccgagcgtgtggaacaacttcaaggtcgctcccgacaccgccatcgtgactttagttgccgtgctgctggtcgcagtgctgttcaagggtctgattggccgactcaacattctgatcggtgtgatcatcggttacgcatacgcttgcattcgtggtcaggttgacttctccgccatcggcgatgccgcttgggttggtctgccgactttccacctgccgcaggttgacttcacgattctgccgatgttcgttccggtggtgctcgtgctcgtcgccgaaaacgtcggccacgtcaagtccgtttcccagatgaccggccgcgactacgatgaccagatcggcaccgccctgttcgccgacggtcttggcaccaccatcgccggtttcggcggcggttccggcaccaccacgtacggtgagaacatcggcgtgatggcagccaccaaggtgtattccaccgcagcctactggtgcgcggctggcttcgcactgctgttgagcctgtgcccgaagttcggtgccatcatcaacacgattccggctggcgtgctcggtggcgtgaccaccctgctgtacggcatgatcggcatggtcggcattcgtatttgggttgagaacaaggtcaacttcgacaagccgctgaacatcatggttgccgcaatcaccatgatcatcgccatcggccagttcgcgttcgctttcaatggcatttccttcaacggcatcgccatcggcaccatcgtgattctcgtcgcctaccacggtctgaaggccatcggcaaggccaccggcacgatcgacaagaacgaccccgacatcctgtgatgcaataatcgtttgcatcgctctgaaggcccttcccaaacgttccctgttccggaagggccttttgcgtacgcctgtgtagctttcgcgtgtgcaaggcattagagatgcgatgaggatatgacgattattgagaagtttcaagatgaaagcatacgtcggagtcttcatcgatagggcatctctgaaatttggttgtacgggtctatggctcatggggatacgaaatatgtggactcgctgaaaacggtgttgaaaccagatgtaatgaagagatcagcagattgcggaatgtaacacagaagaaaggacgtcaatcgtctgacttcatgtggggttgaatgggtatgatgatgcaaaaggggttgtgtccatttttgaatgaaggagttcatcatatgagtaccgcagacggaaagaaaatcgctatcgtcaccggttccgcgcttggattgggatacgagctggctcgacagttgatcgccaaaggatggttcgttgctggtattgatttcaatggcgcacgccaggcggagttgtcgaagacttttgctgccgacgaatacagagcttttgtgggcgatatttccgacgaatcgttcgtgaagaactctgttgccgcaatctcgaaaatcggtcatatcgatttgctgatcaacaatgccggtcagccttcgttcaaagtcccgaccgcatacgaggcggccgatgtggacaagtgtctgaaaggtctgaaaggcatggtgttgtggagcgtggaaacactgaaagcggacggtgagcagaatctcaaaatcgccaacgtcatgtctactgcggcaacgcgaggcaaccccaacgaatccgtgtactgcgccaccaagtggggcgagaagggctacaccaagagtttgcaggccgcatacaaggggaccagtgtgaaaatcgtgggtgtctatccgggtggcatcgacaccccgttctaccgtgacagccatgactacgtttcagaagaaaagcagcataccttcatgcgtgcggatcagctggccgaagtgattctgttcaatctggtcaacaaagcgaatctgaccgtcaccgatatcgaaatcaaccgcaatccggcgtgaatataacggatatgaaggattgaaggaacgtaagcaaaagtattgggcataggctacagttatcaggtttgcgcaacgtgcgtaatatttgacatgaaaggccattgtgcccgataccgtttttgatgaagataccctcgcagccgcttccgaagcgatgggcgaggaagaggaacgtccgttgacgttcgccgaacttggcgttcctggtccgctggtccgcgtgcttgcggccgatgacaagaaaaccgctttcccgattcaggccgacacgcttcccgattcgttggctgggcgagacattcttggccgtggtcgcactggatccggcaagacgctggcattttcgattccgctggtcgctcgcttgggcgaagtggatgccggcgagtatgagaacatgagccagttccgccacgaggtcaatcgtgtgaagcaggcccatgccgaggaacgtcgtgccgacgatttcgtgccgcatccacgtggtctggtgcttgctccgacccgtgagctcgccaaccagatcaacgatgtactcatgccgctcgcccagatctacggcattaacaccaccaccgtgtacggcggtgtgcgttatgcccgccagatccgtgaccttcaggccggtgccgatattgtggtggcctgcccgggtcgtcttgaggatttgatcgaacagggcgcgctcaccttggacaaggttgaggtcgcggttattgatgaggccgacgaaatggccgatatgggcttcctcccgccagtcaagcgactgctcggccagatttcgttcgacgcgcagatcatgctgttctccgccacgctcgaccatggcgtggacgaagtggtggaaaccttcctgtctgatccgaaggtgcatagcgtcgattccgcgacggcgaccgttgacgagatgacccaccatgtgttcaaaaccacgcagggcaaccgtcacgagctggtgcgcaccctcgcttccggcaagggtcgtcgcattctgttcacccgtaccaaattccagacgcagaagcttgccaaggatttaacgcagaacggcattcctgcggccgaattgcacggcaatctgagccagaaccagcgtgaccgcaatctggccgccttcaactccggcgatgtgaacgttatggtggccaccgatgtggccgcgcgaggcatcgacgtttccggtgtggaactcgtggtgcaggtcgaaccgccggaagatccgaaatccttcctgcatcgttccggacgaaccgcgcgagccggccattccggtgacgtggtgaccatcattctgccgaaccagcgccgcaggacccgtcgcatgatgcgtgaggccggactgacggtcgaaccgatcgatgtgacccctgattcgccggaagtgttggaactcgtaggcgaagtggccgagccggtgttcggctggacgcttgagcagtcgcagccggcaggaaatccgcgccgtaggaagaacggcaaggggagtgccgacggcgaacgttccggcagatcgaaccgttccggcgggcgtaacaaggatcgcggcaaagacaagggcggtaagccgtttaagtccgaacgtaaggatcgtcgcgatcgcgaccagcgtgaggagcgtaacgacagcgcgaagaagttcgagccgaagaagaaccgtgcggaacgccgtgccgccaagttcgaaggtcgtgacaatcgtgaattcgaagcgcgtgaacatcgttgggaacatcctgaaattcaagaggaacgccgcgaacagcacgaggaaaagcacaacagcaagcgtcgtgaaaagtatgcgcgcctgcatgagcagcagcgcagcgacaacgagcagcgcgaaacgacgaacaagcgtaggaacgacggcgattacggcaataccgacaatcgcaggaaactgggaaagaagaagtccggacagcttgcgaaaaagcagggtgcgccaagcaagaagcagcgcaagtctgaagcccgtgccgaacgtcagtatgacgataatcgtcggtccaaaggcaagaagcatgacgaacgttcctcggatgcgaaacgctatgaccgtcatacggaagtcaagcgtggcggccgtggcgaacgtcacgacaagcatgcagggcagtcacgccatcgccatgcgaacatcaggaaagcgccattccgcacgcgttgatcgctgaaaagcaaaatcaaagcttgcgtagctggtaaacaatagaaaacggtgtccgccatggtatatgaacacttggcgaacgccgttttctgttaaatctgattgtctattaattgcttggctatatgaaaagttgttcagcctgcgatcggattgtattgatcgtctgcagtgaagcacttacggtatgccatcaccataatgagactgtcggccagaagcgttaacgcggcgatggcggcgagaatcaggaactggtatttcgccgcgtcgataggattgccgccggcgatgatctgaccggccatcatgccaggcaccgtcacaatgccgctggaagccagcgaggcggtagtcggcagcaaacccaaacgaatcgacgagacgatggacgggcgtgcggcctcccaagcggtcgcgcccaacgccagcagcgtatccacttcgtcacggcgttccttcatgctttcgaagaaccggctcaacccaaccgccaaagcggacacggtattgccgagcagcatgccggtcaacggtaccaccaattgcggcgcataccatggttgcgggcgaatgatcaattcggtgaccaacgaaatcataatgagcatggtgatgaccaagctcaaaaacacgggaccggccaagcctttcggcacacctttggcacgagacagggtgatttgcacggccgcgatcagcatgaacatcaccagcaacagcaccagccatggattgttcgacttgatgacgaactccataatgaaacccatggcgcacaattgcagcaacgcacggcacgccgaccatagcagtgtcttgccaatgcccatgcgcatcgcttcggaaatgcctgcggccacggcgaccataaccaatgcgataagcagaccccaaatatcaatggaataataattgccgctcatgcctgcactccttgcgccgaatcggactgtgccgcgaaatcattggaatcattggttgctgcggtgtgcggagcattcgcactctgcaatacgccattggccagtgtgagaatgcgcgtggcacgcccatccggcgggcgatggcgaatacgaatcaccgccatgccccgctctgcggcctgagccatgatggatgccaccttatcggcgttctcatcatccaaaccggcatcaacctcatcggcaagcagcactttcggcgaagtaagcaaggtgcgcgccaaactcacacgggcggcctggcctccagacaagtcatgcggagcacgccccaaatcaatatccgcgcagccaatggcgtcaagcgtggctcgaatgcgagcatccggcagtagatctgtgggtttgagagacttaccggccgaccatttcctgccgaattcttgcttgccttcgcccgcacggatagccaatgtgaacggtaaacgaatcgcctcggccacactcgaaccgatcaataccggcttctgcggcaaatacgccacctgactacgccactgctgcggtgtgaattcgctggcagggcgcccttcaagctgaaaattgccgttcgcattcggattcaatcgtgcgaaagcggtaagcagactactcttgcccgatccggaagggccgaccaaatccacaatctcaccatgcttcacatcaacggataatccgctgaaaatcgtgcgttgttcaccgtcgactggcacgacacaggaaacattcgacgccgaaaaaacatattgcataatgcaacaccataccgcttggctgtcggtcggatgcattggacgcgtttcgtagtgtcttcttagctggaatcacattgcatgggaatattgcgtctgctgtacaaggaacatgtacagggaacatgcgcaaggaagcgcgatcggaggaaaccgtgccgcagtcagagtatcaaaccgatccggcatgactgatgcattcccaatgcgctgttggtcgaaggcgatcccgacgtggggcccgtttcatgcgtatggcgggtattggaacgtgcgttcaaggcgatgatcggcaaagatgagaacgctgcctaagagcatcatccattcagcttgctcacagtatttttcgtcgatattccaaggaaaatcagcctcaaggatgaggtcgtgccaacgtttcatggactacaactggcacattggaaacgaagaatatgaaagcaagaagtgagcatgcgtgcatggttgatgaacataagtttggtggatggctggtttccggcaacgttgttttcagtaaccgcagtgctggcggcgatactgctgggtactgcaatatgggagacggttgccggaagtcgtgacggtggcaaacgcacgtttgccgtagtcgtgtgtccggtagtgattgcgattattgcaggcattgccggattggtgattgcctggttgctgtcggacgtgtttgtggtgttcggtgttgagctggggccgcatgtggtcgcatgggccggttgcggttgcgcgatcattggattcgcgatttgctatgcggtgcagcataggggagtgttgcgtgccgtcgccgttgtattgacggtattcgcggtgctttccgccgccaccggcatcgatcaggcgtatggagaatatgccaccatcggatcactgttcggccaagacacctatcgtgaagccgacctgacgggaatggcgaaacgcagcgatttgattagcgtcacgcaatggaagcagaaaaaagcagacggtagcgtcagcaatattcccgcacatggcgaagtcaggaaagtaaatattccagccacagcatcgcatttcgaagcgcgaaaggcgctggtatatctgccgcctgcagcgcttgccacagccaaacacaagccggcgttgccggtcatactgatgatgagcggccagccgggctctccgggtcgcgtgtttgccgcgggcggcattcaaaccatgatggacgattatgcgcagcatcatggcggactcgcacccattgttattgcggccgaccagttgggagacgattcgcataacaccctatgcgtggattcgccggtgtacggcaatgcgttgacctacttgacgaaagacgtggtcgactgggtgaaagccaatcttccggcggcacagcaagcgcaggactgggcgatcgcaggtttttcacagggggccacatgttcgctgcagatcggtgcgaaccatccggatttgttcggtaccatcattcccaccggcagcgagctcaaaccgaccaatggcagtgaaagcagtatgatcagccggttcttccacggcgatcgcaccgcatacgagaagcagatccccatcaacgccattcgcaaccatgcgccttcgaaccagacgcttgttatcggtgcgggggagcgtgatcgcgagtccgtgcgcaatgtcgaacgcatcgcaccggttgctcaacaggcgggcatgcatgttacggcagtcgaatcgcttgacaatgcgcatgactggcatgccgtgcaagacacgttgcggtacggacttgccgtattcggctacaacacgggactgagcgatgccaagccgaaattggtcgactatccgaatctcaaacgcatttcaatctgaatcatcgaacggaagtactgtattatgacgcaatcgcaggaatcaacagtgaaaccattatttggctttcgtgcgcttatggccgatcttgccgactggattcgtgagcatcgcatgaccttggggtttgtgctgttcatcacgctgttcaatgtcggcatgcagctcgtatgcggcattagacatacgcaatttccgccgcaattgtcgcgcgtgagttttgacgcgctcgcgcatgggcgctggtataccgcgccgatttcactgctgtcggtgcctcagttgggtcgtctgctgatcgacattccactgatactcatcgcattcggcttatgcgaaacggtgattggaaaggcgaagacggcatgggtgtcgctgatcaccacgcttggcggcatagcgctcggtatgggattatgctcgctgttcgcaggcaaaagtccgcaatggcatgcgatttcgcatgatggtgcgattttggggccgctggttgttgtggtgggcacgctgatgtgtgccagcgcgttcaccgccatgctgtggcgtcggcgtattcgtgtgatcggctatagcgtggtgctgatcctgttcctgtatcgtggtgaagccggcgattactgtttgctggcgtcggcgttgcttggccatgtgcttggctatttgatggcttccgagagtcaaggtgatgtgtataggcatggtgccttgtatgagatgcgcaggctgattggtatggctgccggcgtacaggcggtcggttcgctggttgccgtttcctcaagacaatcattcggattgctctccatgttcggcttgctgacaggttccacggaattcgacacggaacaagtgttggattgcctcaacggttcctcgcatgccaactgtttcgcgcaatatcgtatgatgcgattcaccatgcccggaaactggctggtgtcgttgatgccgacgctgatgctgctgttgatcgcatggggtctgtatcgcggacgccgtattgccgcagcgttgagcgtgctgttcaatgcgtgcacagtggtgcttgcgatgctgttttatgtggtgcttccgctgcaatatgttggcgattcgcaggctgatgcgttgcctgcgttggctcgtcatggtgcgtttcatgcgatgttttccactatggcattgccgttgatttttatcgttatcgtcattgcgttccgtcagtgttttacgattcgcactagaagtgagattatgttgcgtgctgcggcaggtgcattgtcggcttttctgttgttgggattgatgtatgccggatatgggcttgcctctcccgacgatttcaatgaaagtccgcaattgatcgcattgcttgccgattatgtgcagcgattgctaccaattggtctgttgagtggtatcgaacctgagtttgtgcccgtcggccgaatttccttgctggtatatcagtgcgtcggtccggtgttttggattattgcattgctttgcgcttgggattgtctgcgagatcgttccatggtgaatgatgcttcacgtcatcgcgttgatgaaatcattcctcttggcggcgaatccatgtcgttcatgactacttgggaaggcaatgactattggttttccgcaaccggacgttccgcgatcgcctatcgagtgtcttacggcatcgcattgaccgtgaccggaccattcggagatcccagcgaatatgcggatgatctcattgatttcgcaacattctgcgcacggcattcttggacgcccgtgttctacagtgtgcacgaatcgcagcgagccgaactcaccaaagccggatgggattcgcttgacgtcggtacggaaatggtcgtcaatcccaacgaatggcagacccgaggcaagaaatggcaggacgtgcgcaccgccatcaacaaagccaaacgagacggcatcaccgacgtgctcaccactttcaaggaggcacccttctcagtacaaacgcagattcgtgagatctccgcacagtgggccggcaaaaaggccctgccggaaatgggattcaccttgggaggcgtcgacgaactgatcgactcccgggtgcgcctactctacgcggttgacggcaatggcaaagtccttggcgtaaccagctggctgcccacctatcgtgacggtacgatcatcggttggacgcttgacttcatgaggcatcgcaccgacagcgtcaacggcatcatggaattcctgattgcacgcatggctgaacgactacgcgacgaaggcaacgtggaattcatgagcttatcggcggcgccgctggccggtatgggatccaacaaaggcgaacacgaggaaagcgaagtgttgcgtcatgcactgcaaatggtcgcagacatcatggaaccagcatacggattccactcactattccgtttcaaactgaaattccaccccgatgaagagaaagtgtatatctgctatcccgacgcagccaaactgccgcaaatatcgcttgccgtggcacaagcctacgtgccgtcgctcacacctgccgaagccatgcgattcgtacgtacgattgcgccgcgtgattgacatgatgtcagacttgagacggtccatggttctggggtagctcgggtctacactaaagaacggttcataaagtactacttttcctgatggaaggggccagcatgtcagctgaagcaaacgtcggcgtagtcggtcttgccgcaatgggcggtagcctcgcacgtaacctcgcacaccacggcaacaaggtggcagtgttcaaccgctcttacggccgtaccgaaaagctcatgaacgaacacggcaacgaaggcgaattcttcccggcaaaaaccctcgaagagttcgtggacagcctcgtcaagccgcgtaccgccatcatcatggtcaaggcgggagagccgaccgacgccatgatcaacgcgctcgccgacctgatggagccgggcgacatcatcgtcgacgcaggcaacgcctacttcccggacaccattcgccgcgagaaggaaatcagcgctcgcggactgcatttcgtcggatgcggtgtgtccggcggtgaggaaggcgctctgcttggaccttccatgatgccgggtggctccgaagaatcctggaagactctgaagccgatttttgaatccatcgcggccaaggccgaaggcgaaccgtgcgtcacccatatcggtctcaatggtgctggccacttcgtcaagatggtgcacaacggtattgagtactccgacatgcagctcatcgctgaaagctacgatctgatgcgtcgtggccttggcatgactccggctgagatcggtgacgtgttcgaagagtggaacaagaccgaactcgactcctatctgatcgaaatcaccgccgaagtgctgcatcaggccgacaagaagaccggtgagccgctggttgacgtgatcgtcgaccatgctggcatgaagggcaccggcacgtggaccgtgcagaccgcactgtctctggccgtaccggtcaccggcatcgccgaagccgtgttcgcccgtggtctttcctccgaagctgatctacgtgaggaagccgccaagcagggcttcaatggccctgacggcaacctgaacctcaccgacgatgagaagaaggccttcatcgaagacattcgtcaggcactctacgcttccaagatcgtcgcctacgcccagggcttcaacgagattaccactgctgccgaagaatatggctgggatatcgatctggctgccgtggcacgcatctggcgtggcggctgcatcatccgtgcgaagttcctcaaccgtatttccgaagcgttcgaatcaggtgaagccaacgtgtcgctgctgttcgctccgtacttcaagaacgccatcgaaaccgccgaaaagtcttggcgtaacgtggtggctcaggccgccgtcaacggtttgcctactccggcgttcgcttcctcgctgtcgtacttcgacggactgcgttccaagcgcctgcccgccgccctgatccaaggtcagcgcgactatttcggcgctcacacctaccagcgtgtggatcagccgggcgcattccacacgctgtgggctgagccgggccgcgaggaaatcgaagcctgatagacgtatttctgcaacgaatctagcggattaacagatgaaaagagcctcacgctttatgaaaagtgtgcggctctttgtgttgcggcaaatatgatcagccgcaagggaaactcgttgagttgcctcctgaattattcgcgatgctggttgcgtgggttgccgccattcatgattgcggcgacccgtcgcgtcagagcgcgggggagtagtcgttccgctgcggctccggctttggtgaggtagccgtggtaggcaagcgtgcgcccctgcttcatcttccgatacgcgtaggtggcaagctggtaggcggtggccggtttggtcagcgtgaagaaattcatgccatgcatgttcgcggccttggcgaaccctgtggatgtcggtccggggcatacgcaggtcacactcacaccggtatctcgcaattcgtacgacaccgcttccgaaagcgatcgtacgaacgctttcgacgcgaaatatatcgccatatatgggcctgccatcattgaagcaacagaagagatgttcaatatgcgtccgtgaccctgctcgcgcatatcacgaccataacggtacgtaagttcagccaacgcggccatgttgagctgcatcatctcatgctggcgatgccagtcggcgtcgagaaaacccgtccaatccgcaaaaccggcgttattgacgagatgatccacttcaaaaccttgcgaaactgtgtaatcatgcaactgttgcggtgcgtcagactcgcttagatcaagcgcaaccgtctccacatgcacgccatagcgatgttccagcgtgcgcttcacgtcatcaagtttgccttgactgcgtgccgtaatgatgagatcatgcctgtcggccgcaaacaatgccgccatctcacgcccaatgccactcgaagcccccgttatcaacgcatatgccataaaaccacctttcttaagtattgatgttcatggtagtcaatacgcatgcaataacgccatttgcaacgcaatggtccggaacttttcgactgggctggctgattgacagttttcatgcacttctcgcatggaaagtaatacatcatttacattagttattttggtttggttcgttcacaatgggtgcgtcagcatgaatgtgaaagaaccagtatggaatgttcgaaaggccatgtttttgaactcatacaacagggcggcccgaccgacaaagtcattacaatgcatgtcgtgaaaccgggatcattcacagcttgcatttgacttcgtccacttgaagttcttaagtttgatggcatgacttacgatttcgacactcccgtagaccgatccggcacgtattcgctcaagtgggaagaggcaggagatgcgctgcccatgtgggtggcggatatggaatttcaaaccgctccacagattcgagccgcactgcagcagcgtcttgaccacggtattttcggatattccatcgtccctcctgaatggaatcaggcatacgttgactggtggcaccgtaggcataatcttgatatcgacccggaatcgctcgtattcagcaccggcgtggtgccggcaatctccagcatggtacgaaaactcaccacagcaaacgaaaacgtgcttatccaaactccggtctacaacattttcttcaattcgattatcaataatggatgccgcgtgcttgaatcaccgttggaatacgacggttccggacattactccatcaactgggccgatctggaatccaagttggccgatccgcaaaccacgctgatgatcctgtgcaatccacacaatcccgtaggccgaatctgggatcgcgacaccctcgcacgcataggtgagctttgctggaaccatcatgtgaccgtaatcagcgacgaaattcattgtgatcttaccgatccgggatatgattacgtgccctttgcctcggtgaatgagcagtgcgcaatgaactccgtgacctgcatggcaccgaccaaaacgttcaatatcgccggtcttaacacggctgccgtaatgattccaaatcccgtgctgaggcataaggtatggcgtgcgctcaacacggacgaagtggccgaaccgaacgccttcgccatgacggccacgctcgctgccttcaacgagagcgagccttggcttgaggaattgcgcgcatacttggcaggcaacaaagccgaagcacgagccatgatcaacgaatacaatgctgccgcggcaccggaacgacgcatcgccctgattgaaagccatgccacctacttgttgtgggtcgattgttcgaaactgacgcacgataccgctctgttgtgcgaacatctcaagcgcaatcatcaggtgatgttctccgaaggtgccgagtatggcggcaacgggcatgatttcattcgcatcaacgtggcctgcccgcgaagcaccatgcaagaaggattcaatcgtctgttcgccggattacgtgattttcggtgaattaatataagaccatcggctgtgatattgctcacagccgctaggaaacggctggttttgtgggttttcacaaaatatggaaaggacgtttttcggatgggcaccgccgtccgtgacctgttggcgatactatgaggcatatgactgaaactgtttcatccgtacttggcacgcctgaagagtggacgaatccgctgcgcgatccgcgcgatcttcgacttccacgtattgcaggcccgtgcagtattgtgattttcggcgtgaccggcgatctgtcacgcaagaagctgcttcccgccatttatgatctggctaatcgtggcctattgccgccaagcttcggtttgacgggttttgcacgtcgtgattggaccgaggatcatttcaaggatttcgtgaaggagaacgtgcaggcgcactgccgcacgccattcaaggaggcgacctggaagcagctcgccgacggtattcgttttgtgcagggcacgttcgatgatccgaaggcgttcgaacgattgtcgaacactgttgccgagcttgaccgtgatcgtggcacgcgaggtaaccatgcgttctacatgtcggtgccgccgcgcgcgttcccgcaggtttcccgacagttggcggattgcggtctggcgaagtccgacaagggcgcttggcgtcgtgtgatcatcgagaaaccgttcgggcatgatctggccagcgctaaggagctggatcgtgtggtttccgaggtgttcgacccatcgagtgtgttccgtatcgatcattatctcggtaaggagacggtgcagaatattctggcgcttcgtttcgcgaacgccatgtatgagccgatttggaacaataattacgtcgaccatgtgcagattacccacgccgaggatatcggcgtggccggtcgtgccggatactatgacggcatcggtgccgcacgcgacatcatccagaaccacctgctgcagctcatggcattgacggccatggaggagccggtctccttctccgccgctgatctgacggctgaaaagacgaaggtgctgtccgcagtgcgcttgccgaaggatctggcggcgcatacggcccgcggacagtatgccgccggatggcagggttctcatgaggttgtcggctatttggatgagaagggcattaatccggcttcaaccacagagacttacgcagcgatccgactggatgtcgatacgcgccgttgggccggcgtgccgttctacctgcgtacgggcaaacgtttgggcaagcgtgtcacggagattgccgtggtgttcaagcgtgccccgcatctgccgttcgagtcgaccgcaacgaaggagctcggcaagaatgcgatcgtgatccgcgtgcagcccgatgagggtgtgaccatgcggttcggcgcgaaggtgccgggtggcacgtcgatggaggtccgtgacgtgtcgatggacttcggttacggccgttcgttcaccgaatcgtctccggaagcctatgaacgtctgattcttgacgtattgctgggcgatccgccactgttcccaaccacacgcgaagtggaattgagctggcagatcctcgatccgatcgaagagttctggtccacgcttggccagccgcaaccgtatcgttccggaacgtggggccctcaggaagccgttgaaatgctggcccgcgatggacaccgttggaggatgccgtgatcattaccatgaagaacaccgaaacccgtgagatttcggcgaaaatcgatgaattgcacgaggagcgtggcgaagcggctctgggtcgcgtgctcacactgctgatctccacgaatgagacgtcgctggagcatgatctcgccgtggcgaacaacgccagccgtgagcatccctgccgtgtgatcgcaatcgcgccgaattcacgtagggtggatgccgctgccgatgatggcaagccgcgcacctttctcgacgcggaagtgcgattcggttccgacgctggcgcgggcgaaatcatcgtgttgcgtccgattggtgggctggttcaccaccctgatacattggtgattccgctattggtgccggacgctccggtggtggcttggtggccaaacgaagcccccgcgaacctatcgaacgatttgctgggttccatggcgcgcagccgtatcaccgatgccatgcattcctcgaatccgatgcggaccatggatgatctgcgccgcaactggtcgtcgaagaatgtggacatgtcgtggactcgcttgactgtttggcgcgcaatgctcgcttcgatgcttgaccagccgccgcatcttccagtaagcggcgtgcgtgtgaccggaccaaagaacttcctgccgttgaatctgctggccgcatggcttcgtcttcgtctgaacgtgcctgttgtggtggaagacgatccgaatgcaaccgccgtgaccggcgtgtatctgacccgttccgatggcgtgctgagtttggaacgcccatccaccgacgatggcatcgccgtattgaacgttccagggcagtccccgcaaaccatgagcgttcccgcacgaaccatcgaggaatgcttgagtgaggaattgggtcgactctatccggacgagatctatgcggaagtcgtgactcaaggctgggatcttatcaattcgaagcactgaatcgattctccgaaacaataaaggaacaatgcaggaaaagcatatggcagaacgcaccaccgttgtatatcccaatcctcagattctggctgaagccgtggccgcacgtacgctgttgaccatcaccgatcttctgtcggaaccgaatcgcacccgcgttgacattgccgtgaccggtggaaccgacggcaatcgagtgttcgacgccatgaacgcgagcccattgaacgatgccgtggactggagccgcgtgcacgtatggtggggcgacgaacgattcgtggccgccgatgacgacgatcgcaacgccaagcaggcgcgtgaggcatggtatggcaaactggttgccgacggccgtatgccggcaggcaacattcatgcgatgccgtccgatgagcgtaacttggaaggcgtcgcggcagcctcacccgaacagactgatgcggtgctggctgaagccgccgcgcaataccagcgtgaactcattgaacagttgggtgagaatccagctttggacatcgccatgttcggtatgggaccggacgcgcatttcgcatccctgttccccgaccatggcgagtcggagatcgacgatccgcatgtgcttgtcgccggtgtgcgcgattcaccgaagccgccgccactgcgcctgacgctgaccgtgccgatgatcgcacgatcgaagcacacgtgggtgttcacatctgaagtacgcaaggcggatgcggttgctgcagcattcgcgcaacgcaacaatccgcatgcgccaagctcttatgccgatggtgaggaactgctgtggcttatcgacaaaggtgccgcctccagattgtgatgcaagaaccgggactatggaatcccgatagccgggttccgttggttccgtgacgggcacgtcacctaagtctctgcctgtcatggattactcccatggctaaacatcaaggctgaatcgtttggatgagtgagcgcgcaacgccatgcgtgtagtatggcggcagtcaaacatgacagaccctgcattatgactatgagaggaaacggcatcatggaacagccatctaagttccaacatcagcttcagcccgatatgccatcgtcttccacgatgtccacgtcacctcatccggaacaaactccgccatggggcgcgctatgggtgttggctttgggactggccatgattgtgctggacagctcaatcgtcaacgtctccatccccaccattatcgacgatatcggcatcgacctgaccgacgcccagtgggtcacatcactgtacaacatcgtactcgccgcgctgctgcttcccttcggcaagcttggcgacgccaaaggacgcaaactggtattccaaattggaactgtgattttcgtggcaagttcattgctcgccgccacatcgcaggacgctggcatgctgctcaccgctcgcgcgttgcagggcatcggtggcgcgatgatcatgccgaacaccctgtccacggtgtccgccacgttccgtggcaagtatcgcgctgcggctttcggagtctggggcgcggtaatgagttcagccgccgctctcggaccgttgctcggcggcgtgcttaccgagaccttggggtggcgatggattttcctggtgaaccttccgctaggcatcatcatttttgtggcaaccattcctttggtgccaaagaccggtggccatacctcgaacatcacttcctcaaccgcttcttctaccattcgattccaaagcattgatgtggacattccaggcgtggtgctgtccgcactgacttctgccctgctcgtattcggacttatcgaaggcgagacctacggctggtggaagcagacttccactcagttgaagatgggtggtctgacatggaaccacggctggctgtcgccggtgccgatttgtctggtcgccggtatgctcctgctggtcgtcttcataaccgtagaacttgcacgaggcaaagccgggcgaccggtgatgctggacatgaccctgttccgcatcaagacattctcgtggggcaatctgtcggctgcggccatcgccgccggcgagttcgcgctggtgttcgcgcttccgctgtatctcatcaacgcgcgcggactcgacacgctacaggccggtgcgatgctggccgtgatgggattgggctctattatcgccggtagtcaggcacatatgctggcctccaaattcactccggtcggcgtggtccaacttggcttggtgattgagatcatcgcggtagccgtgattgcagtcctcatgccggtggaattcgcagtgtggtggcagcttcttcctttgaccgcctacggctgcggcttagggctcgcttccgcgcagctgaccagcgtggtgctgtccgaagtgccgattccccagtccggtgaaggatcggccacccagtccaccgtccgtcagcttggcaccgccatgggctcggccatctcaggcgcggcattgaccatggccatcaatgggacgttgccggcacgacttgaatcccttggactgcccgctaaagtcggcgatggactggccaaggcggtcagcagctcggctggcggtgtaattggctcgttccgcagcggagatggatcggcggcccaattcggtgacgaagcgccgaaaatcgccgatgcgatgacttccgggttcattgagggcaaccgttggacacttttggtggcaggctgcatgctgctcatcggtttgctggcttcggtcgctgtgcgacgcgcggcatcaacgcatagcacacactgacaaacatgaggcagggacgatctgctgaatggttttggtgggccagcagctcaacggcgaaaagttctactgaagccggccgataccaaggcgaaactgatcgcgcggtaaggtggggtttatgaaagtagtagtgcaacgagtgagccaagccagcgtcgacgtcgtcaacgaactgggcgccgtagaccccaccttcgaacctcagcagatcggatccggattcatgctgctcgtaggcgtaaccgatgaggatggtgaggagcagatttcttggcttgcccacaaaatcctcaacctgcgggttttcgaagacgagcaaggcaaaatgaaccgttccatcaaagacatcggcggtgaaatcctgtccatttcacagttcacgttgtttgccgacgtgaggaaaggcaaccgtccaagcttcgtcaaagcgggcaagccggaacatgccaacattacttggatcaaattcaacgaagcgctgcgatccggcggtgtgccagtacgcgaaggccgcttcggagcgcacatgcgcgttggactgatcaacgacggtccggtaaccatcgccattgataccgacaatctgtaatcaatagtaaagcgacgattgcttggtgatataaaaaatatttgaggagctgtgatataatttgcagctcctcaaatattgttttttgattgacaatgatgtttacctgttgtcggtaattatcgtcaccttgttcggatcaatcttcattgggtcaagagtcaattccttgatgacatccgcacgaatcgtgccggacgaaggattgaatacactatcgatagtgctgtgaatatcggcatccacattcgaatattcgaaagcaagcgtcgtattgattagacggcaattacgtaatacgagattatccacatagcacaaaccctgcagactttcgatcgtacagttctcaaacgtgacattacgggaattccaagccaaatactcgccggaaatgaatgaatcacgtactgtcacattctcgcaattccagaagcaatccttggaaatcaatcgagaatttgtgatttcaatattacgtgcgccatcaaatggataattgccaaccaaacgcagattataggctttaatatcggaacaattcatcgccagataatcgccacgagcactcacattttccagtgaaacgttcgaacaagcccataatgtttcctcggcattgacgaaatcaacattcctcaacgcaacatcatggcaccggcggaaattcttcggcgcttcaaacgtgcaatcctcaacacgaatggtattcgtataccacacgcccgcgcgtgccatctcgaaccatgtgcaatcctttgccaaaatatccgagcaataccacagcggatacttccatttgaacgaactcgacttaagctcaatatcatgcgcatgcttcaacggtgattcgccatcatcgaaaatcgtgtcgatatatcgcttgcctgatgcttggaattcggcgcgttcgccggtcagtaacgcctgacgaacctcgtgcatgtcactcactgataactctccttgaaaacgttctgttgccaagatagaaagttcaagtacttgaagtcaaacgcatgcccatgtttcgctggcgggcgaagcggatgagcgatggaacgcgttataagcaatgtcgatatgcgtgcgggtgtttgcgaaacatgactgtcggtaccatgaattgaacgattagacaattgggtggttacaaggcattgtggtcgcgaacgggcttgccacgtatggcagggaggaatgcggatgagccagcggaatgggggagtgaagacgcgtgcgttcaaagccgcgttccccaaagtgctgccgatttgcatcagcttcttctttctggccatgtcgtacggagtgcttatgggaacccgcgggttttcgttcctgtggccgttgtacatgagcgcgttcatctacaccggttccatggaattcgttacggtgaatctgctggtttccgcattcaatccgttcgccacgcttatgttggcgctgatgatgggaacaaggcacctgttttacggactgtccatgctggggcgtttcaagaacatgggggcgaaaaaaccgtatttgatttacgccatgtgtgatgagacgttcgcggccaacaacagcgcgcaaataccggcggatgttgaccgcggctggttctatttcttcgtgtcgctgctgaatcaggtttcctgggtggctggagcgacgctcggaggcattgtcggctggcgattgacgttcgacaccaccggtttggatttcgtgatgaccgcattgtttgtggttattttcgtggatcaatggttgacaacgaaacgcaaaagccatatggcggcgttgacgggcactgtggtgccggtgatttgcatggcgctgttcggtgctgacaatttcatgatcccgtcgttgattgccatgctggtgatgttcattatgttgcgtccgtatttggatgatttgaaacctgataatgttgggaaacgtgatgatgctgatggtgcggtcgaatccgctgcggatcgtaacgaagtaggggaggcgcggtcatgatcatgaccacatggcagggcgtcgtcactgtactgatggcggtgcttggcaccatcatcacccgttttctgccgttcgtgctctttcccgagtcaaagaaaccgccgcacatcatcgactatcttggcaacgtgcttccgtatgctatgaccggactgctggtggtgtattcgctgaaaaacgtcaatccttttgctggaagccacggcattcccgaagcgatcgccatcgccgcgatcgtcgtgctgcacgtatggaaacgcaacatgctgctctcgatcgccggcggcaccgtcgtgtatatggcattacttcagcttgtttttgcatgattgtctgttttgtaggattgcccaaatctgaagtgagttttatagggattttccacagttgttattgctgatatcccatatcgtgagaagaaatgcgttgatgcgattgacgcgcctactctttttctttagccaataaggagctgtgttgagcggctctggctgtatagaagagttatatctaacgagagagaacaatatgactagtgcagcaagcactgccaatgccgcggttccagcgcccggcaaactggagttcaaggatgattacacgcctgaggaagcggaacgcgtcatccgcaattcgaaggggctccctgtcggtgtgaagccgaagatggtgtggacgtggccgaaggccctgctgtgggccgtcattgccattgtgtgcgctattggttgggctattctggcggtttcccgtggcgagcagatcagcgccatctggttcgtggttgtggcattgtgctcctacgcgatcgcttaccgtttctacgcgtactatattcagatcaagatcatgcgtaccgacgatgcgaacgcgacgccggccgagcgcgtgcatgacggcgccaacttcgaacgtgccgaccgtcgcgtgctgttcggccagcatttcgccggcatttccggtgcgggcccgcttgttggtcctattctggccgcccaaatgggttatctgccgtccgtgatgtggatcattctcggtgtgattttcgccggcgccgtgcaggatatgctcatgctgtggatctccgccaagcgtcgcggccgttccttcggtcagatggcaaccgacgaaatgggcaagttcggcggcactatcctgtcgatcttcctgatcgtgatgaccgccatcgccatggcattccttgcgctcgtggccatcaaggccatggcttcctcgccgtgggccgtgttctctattggtatgaccattccgatcgccttgatcatgggctgcttccagcgtttcctgcatcgtagcgttatcgaaaccacggtgctcggcttcgtgctgctcgtgatcgacatcatcgctggcggttggatctccagcgttccggcaatcgccgacgtgttcacgttgaacgccaaggaactggttatcgcactggtgatctactccttcgccgccgccgcgttgccgcactggctgctcgtcaccccgcgtgactacctgtccacgctgatgaagatcggcacgcttgtgctgctcgtgcttggcattctcatcgccaatccgtccgtgcagatgccggctctgactgaattcgcgtccacctccacgggaccgaccttcgcaggcgacctgttcccgttcctgttcatcaccatcgcgtgcggcgctctttccggcttccacggcgcagtgagctccggcctgaccccgaaggctgtggagaaggaaaaccagatccgcatgatcggctacggttccatgctggttgaatccttcaccgccgtgatcgcactgattgcagccatcaccatttcccagggcatctacttctccacgaacatgtccgcctcgcagatctccaccgcttccggcgtgaccctgaccgccacttccactcctgacgagcgggctgaggccgcggtcaaggccgtggattcgatgaaggtttccgacattgaaggcaaccagatgaaggtcacttgggattctgtcgacgagaacggcaatgccaagacctatgaaggcgccgacgctttgaagcaggccgcttccgacattggcgagaacaccatcgtttcccgcaccggcggcgccaccacgttcgctatgggtatggccaacttcctcaagtcctacctcggcggtcatgactccatggccttctggtaccacttcgccatcatgttcgaagcgttgttcatcctcaccaccgttgacaacggcacccgcgtggcccgttatcagattggtgagttgctgggcaacgtgcgcaagctgaagaagttcgctgatccgacgtggaaaccgggcaacatcatcaccacactgatcgcaaccgccctgtggggtggcctgctgtgggtcggcgtgtgcgatacgaatggtggtatcaacgccatgatgcctattttcggtatttccaaccagctgcttgccgccgcatgcttcatgctggtcaccgtttgcgtggccaagcttggctataagaagtacctgtggattcctgttgttcctctcgtttgggatgtggccgtgaccttcaccgccgacttccagaagatcgtcggaccgatcagttacttcgccaccgcttccaagtatcagacgctgatcgatggtggcactttggaaggcgaagcgttggtcaacgccaaggccgcactctccaatgcgtaccttgacggcgtgctctctgtgttcttcatggtcatgatgggagtcttcctggtcgtcggcatctaccagaccgtgaagattcttgccaagggcaagttcggtgtggaaaccacgtctgaggagccgttcgtggaatccgaatggttcgcaccgtccagcctgatcgccaccaagctcgaaaagaaggtgcagcgcgaatacgcggccaagagctatgagctggcgcagaaggaacaggcagcagcctgatgcagggattcaccaccatggtcagacgaatctggtccgcattattgaaagccaaggccggattcgtctggtatgtgcgcgaattcagcggagaagcgaaatacgaccactatctggagcatttcgcaagcgaacatccctgcgaaaccccgctgaccgaacgcgaatactggcgcatgcgagaggaatacgatcgcaagcatcccaacaccagttgctgttgctgaaactaacggccatacataaacaatccccgtctttcatttcggaagacggggattgtttttcttatatttatgttgcttgcttgcgattattcctataccgaagatattcgattgcatgttccgcaatcaatatttcgcaatcaagaagcgagtcccatgctgtatttcaatgtcatcacacgaatcgcggactgcgttactttgtctgcaaaagcggaatcagccgcggccttcgcattcaaaccatccaaaacctgctgaacataatcgaaagcgccaatgcaggcaagatcaccgccggcctcaaccaatcgcacacccaaatcactcggctgaatgccacccaacgcagtggcggacaaagaatccgaagtgatgacaccttggaatccgaccgtattgcgcaaataatccgttaccaaagcgctggagaacacggcgggattattcggatcaatagcctgataggtggcaagcgacatcatcaccatggaagggttcgcctccaacgtactgttgaacgcgccgatttccgcaccgtccaacgtggtggtggtatcaagaatgccgtcggcggtgaaatcggtgttgcccgtcaccgaacccaaaccaggatagtgcttgatggcgctgcctacacccgaatccgccatgccctgaatgaacgccttggcatggtcggcattgccgtccgcatcaagaccaaaatcacgatacagtgcgccgatcgggccattggaagccctatctaccgttaccgtgcccaccaccggcgccaaatcaacattgatgccggccgacttgagttgggaaccccatacggcagccgattgccgtagctggttggtcgacattgaaccctgattggtggcggaaggcatctggtcgaacccatcaccctgcagatgctgcaccaaaccaccttcctgatcggtggtcatcaggagttgattattaccaggggcatacgattgcaaggtggatgtggcggtggccacgccagccgttcccgaattccaattgccgatgatcaacaccgatccgacatgctggttcacaatgagatcctgtaacgaggaaggatcggatcccgcatacaggggtgccatgacgagctgaccgacgcgctctgcaagactcatggcattgactgcagccacagctctgccatgcggcgagtcgtccaccacgcttggcacgttggatttgtcaagcgcatcatgtgatgcatcggactgctgcgaattggattgctcggattggttggagccagcattcaaactcgcgctggatgaacacccagcgaacgatagcggcagtgcgatggcgcacagtgcggcagcacaacgagcgaaatgaacgtgaactctcctcatagtgtcattatctatcacatgccggtgatggcgaatacgatcgcataagaaaagaacgggtggattcgtgttcgtgaattgcgtaaacattaggctagcggcataaagcacgttccgtgcctgtcgataggctattagtatgtctttttttgatatgtttggtcccatgttcgacccggaaagcggtccgaaccgctcccaagggcagcgtgccaataaatccggcaacgatgatcccatcattctcaatgtcgaaaccgatggtgataacaccgcccggtcttcggcgaacatgcctccaagaggtccgtccggtccgcgtatcacacgccagccgaaccgtccgcgcaaatcgtcgaacggcaacaagattctaatcggtgtggtgctggcgcttgccatcatcatcggcctgttctttggcttggcgcagttcatcaccgacgtcatgtggtatgcgcagcttggcttccaaagcgtgatttggacgcagttgggtaccagggtaggcctgtgggtggcgtatgcgctgctgatcgccgcggtcggattcctgtccgcgtcgctggcgatctgggctcgccccgatgctgccgatggttccacgattcgtattaacggcgacaccatcgaagtgggcaagggcgtgagctcaaagaatgcacgtcgtgtggctgtggtgatttcattgatcgtcggcttgatgttcggatcgcagtttaatgcgaattggtctgaaatcctgctgatgttcaacgcgcagagtttcggcaccaccgacccgcaattcggcatcgacaatggtttctatgtgttcgtattgcctggcttgaagctgatcatgtcggcagtgtcgttgctgctgcttgccggcatcatcttctccatcgtcacgcatgtgatgatgggcggcatccgaatcaccatgccagtgcatggtcgtggactgttccacatcaccaagcgtgcgcgtagacagatcggcatctggctgatgctcaacatgttcgcatgggcgacgaatcaggtgcttggcgtgttctcccacctcacgcaggagggtagccgcatcaccggtgccacgtataccacggtcaacgccacgattcccgtcaccttcatcatggctgccatcaccgtcattctcggtgtgattctcggcgtgtggatcatgaagtcgcatgcgttggaaggccaggctccgattgcggtgcgtgcttccgaagcgcttaaagcgtggaaggtgccgaccgtggccatcgcatccgccattgtggtgagcttggtgcttaccgtggcatggccgatgctgctgcagcgtttccgtgtgaatccgaacgcgcaggaaatggaatctacctatatccagcgtaatatcgacgccacccgtgaagcatacggtctgaacaatgtgaagaccgaacagtatcaggccactacggaaggcgaggctggtgcgttggctgattccgcggaatcgaccgcgcagatccgactgctcgatccgcagatcgtttccccgacattcaagcagctgcagcaatccaagcagtattacacgtttgccgatactcttgccgtcgacaaatatgaggtcgacggtgtgagccaagatacggtgatcgcagcacgagaacttgaccttgccggtcttgacaatcgtaactgggtcaacgaccataccgtgtacacgcacggctatggtgtggtggccgcctacggcaacaaggtgacggccgacggccagccgaagttcttcgaggcgggtattccaacccaaggcaagctcaccgaatccgaacagtacgagccgcgtatctacttctcgccgaacgcttccgaatattcgatcgtgggcgctccggaaggtacgcagtcgtgggagttcgattacccgaccggttccgaaggcgccaccaacacgttcggtggcaatggcggcccgaagatcggtaatatcttctcccgactgctgtatgccatccgtttcggctccgaccagattctgttctctaaccgtgtgaactccgaatcgcagattctctatgatcgttccccgaaggagcgtgtggccaaggtcgcgccatacctgacgcttgacggccgtgtgtacccggcggtcgtggatggtcgtgtcaagtggatcgtcgatggctacaccacgtctgacgcctacccgtattcgcagatgaccgatctgggcgaagcctccaaggattccactacggaatcttcggccacggtgagtgagctggcttcgaagaacgccaactacattcgcaactccgtgaaggccaccgtcgatgcgtatgacggttccgtggacctgtacgtgtgggacgaatccgatccggtgatcaaggcatggcagaagatcttccccggccagtaccaccagttgtcggagatttccggcgatctgatgagccacctgcgttacccggaaagcctgttcaaggtgcagcgagaactgttgaccaagtaccatgtgtcgagcgccagccagttcttctccggtgaggatttctggcagactccggtcgatccgaccgaatcccagcaggctcaggaacgcgacattctgcagccgccgtactatttgacgctgcagaccggtggatccaacgaaccggtgttctcgttgacgtcgtcgtatattcccgcaggcacgtcaactcgagagattttgacgggattcctgtctgtcgattccgatgcgggccacgaaaaaggcaagatcggcgcgaactatggcacgcttcgattgcaggagttgccgaaggattccaatgtgccaggccccggtcaggcacagaacaacttcaatgcgtcggccgacgtgtcgaaggaacttaatttgcttgaatccggttccaccaatgtgcagcgaggcaatctgcttacactgccgctcggcggcggattggtgtacgtgcagccggtgtacgtcaagtcttccggttccaccagtttcccgctgttgaagaaggtgttggtggccttcggcgaccaggtcggattcgccaacacgttggacgaagcgctcgatcaggtgttcggcggcaactccggtgcatccgctggcgatgctgaaaacgtcgacggctcgaccagtggcaagactgatacgtccgataccaacggcgatgcctccaccgatggttcttccggaaccgatggcacggattcgtcatctggaacagactcgggcaatgacagcagttccggcaataccggtagtagctccggcacgatgagcaacggtctgaagagcgcgcttaacgacgcttcccaggcaatgaaggattccgacgcggccatgaagaaaggcgattggtccgcttatggcgaggcgcagaagaaacttcaggaagcgttgaacaaggcgctcgaactcgagcagtagtttccgcacaagttccgtacgattgctgtttgcataaggcgggagactggttccatatggagaaccggtcttccgccttatgcatatgcccggtatgctcaaaaacatgatcgagtattcctaccgcatcgcaacgcaaaacgacattcaagcaatcaccgacatttacaacgctgcagtcatacgaggtggatcatcggccgatataactccacgcacatacgaacagcgcaaagcatgggttgaatcgcatcatgatccgtacgcggtgttcgttacggaaacggtagatgatgacggagagaggcggatcattggattcagcgcgctttccgttttctacgatcgcgcaggatacgacggcgtcaccgatctcgcctattatatcgatccgcaatggcagggcaggggagtcggtacatacacactcaccaaactgcttgaagaatgtcgaaagcgtaatatgcgtaaggcatgcggcattattttcgcagacaatgccggttcgatcgcactgatgaaacggttcggttttacacagtttggcctcatgccaactgccgccaccgattccaccggcaccatgcgtgacatgagttactggtatctcgacctgtaagtacaatctttgcggttatcaagacgagacaatgtgacgcaatatgaacgcgcacaaacgtatgtatgaatgaatggaacgatttcaatggcatctgatttctggttgatcgcaggacttggcaatccgggatccaaatacgaaggcacccgtcacaatatgggatttatggcggccgatctgttggccgaacgttggtcggtcaacttttccgaccataaagggcttgccatgctcggcaaaggcgtgatgaacctgtctggccgtaacgtcaaattcttcctggcaaagccgctcacctacatgaacgagtcaggtaatgcgttggcttccatcagtgcctactatcagattgaaccagaccatattgtggtgattcacgacgacatggatcttgatttcggacgtatcaaagtcaaggcaggcggctccgcaggcggccataacggcatcaaatcaattgatcgtgccttgggaacgccaaagtatgcccgagtgcgcatgggagtcggtcatgcgcaacgcggcgcccacgcccacgacaacacggtgaattgggtgctgggcggattcggtccggatcagcgcaagcagcttccggaattccttgccgacggtgccgacgcggcggaaaccatcatcttcaacggcctcgccaaggctcaggagcagttcaatggccgctgaaccggtgcaactgccgacgtcaggttcgctggctggcattctcgacgtactcgaaaccgatgaggattttcgtgcgctgatttccgatgagatcgaagtgccggaatccgacatagaccccagcatcaccgttggcgttcccgaaggattgcgtccggcgctcgctgccggggcagcgggaacacgaccggttgtgcttgtggtggcttccgggcgcgaggccgaggaaatggttgaggcgattcgttcgtggtattccggcgatccaaacgatgtggcacagcttgaagcgtgggaaaccttgccgcacgaacgtctttcgcctcgcgccgataccgtggcgagccgtatggcggtgttccgcagactgatgcaccctcaagagggaagcaagctgtttggccccatcaggattctcgtcatgccggtgcgttccctgattcagcctgtggttgcgggcttgggggatgtggagccgctggtgttctcccaaggtgaggagttggcgctcgatgaggcgtcgcatcgactggtggagaatgcgtatactcgagtcgacttggtgatggatcgtggtgaattcgcagtgcgaggcggcattatcgacgtgtttcctccaacattgccgcatccggttcgtatcgaattcttcggtgacgaaatcgataccatcaaggaattccatgcatccgaccagcgtacgtatggcagtgacattccgatggtctgggccacgccatgccgtgagctgcagctgaccgaaaaggtgcgcgtgcgtgcgaaatccctgatcggctccattccaaacgccgaagacatgcttgaatccattgccaacgccattcctgtcgaaggcatggaatcgttgcttcccgcattagtcgatgatatggaaccggtgcagggcatgcttcccaagcgtgcgttggtgatgctgtccgatccggaaaaattgcgtcgcgctgccgacgatcttgccaaaacggctaatgaattccttgcagccagttggcatgttgctgcatccggtcatggtgccggtgctccaatcacattcgatcaggcgaatttctacgattttgaggaaacgatttcctcactggtgttctctaggcatgacgtatggaagcttacgagtttcggtgtggactccagtagggaaggccgcgttcagctcgacgccaccaatcctggagaatatcgcggagatgaggccaagacagcttccggtatcgaaggtcttcttgatgccggctatgccgtcaccgtcactgcaggagcgcaaggcactcttgttcgactcaaacgtgccatcaacgaaacgggaatcgccaacttcgactgcatcagatcgcgtgccatcgacggattcgtcgataatgccgcgaaagtcgcactgcttaccgaacgcgacctgaccggacgtacatcggccgcgggacaggcaaaaacacctaaacgtcgccgtaaggccatcgaccttatggagctcaaagccggcgattacgtggtgcatgagcagcatggcatcggcaggttcctcgaaatgcgccagcgtaccatcggagcgggcgccaaccagaccacacgcgagtatctggtcatcgaatacgcatccagcaagcgcggcgcacctgccgacaaactgttcatccccaccgaccagcttgaccaagtcagcaaatacatcggtgccgacgctccaaaactcaacaaactgggcggatccgactgggctgccaccaaggcgaaagcacgtaagcatgtgcacgaaatcgccgaagatctggtcaaactgtattcggcacgtcaacgtatgcaggggtatgccttcagcaaagacaccccttggcagaaagaactggaagacgctttcccgtaccaagaaaccgctgatcagctgaccaccatcgacgaagtcaaatccgatatggaaaagcccgtgccgatggatcgcctgatttgcggcgacgtgggattcggcaaaaccgaaatcgccgtacgtgccgcattcaaggcggtgcaggattccaaacaggtggctgtgctggtgccgaccacattgctggtgcaacagcatttcgagacgttcaccgaacgttttgaaggattcccggtggaagtaagggcgatgagccgtttccaaaccaccaaggagatcaacgacactatcgagggacttgaagacggttccgtcgatgtggtgatcggtacgcacaaactgctcggaccgaaggtcaaattcaaggatctgggactggtcatcatcgatgaggagcagcgtttcggcgtcgaacacaaagagacgttgaaggcgctgcgtaccaatgtggatgtgctgagtctgtcggcaacaccgattccgcgaacgctggagatggccgttacaggcattcgtgaaatgtccacgttggccacgcctccggaagaccgcttgccggtgcttacctacgttggcgcgtatgaggatgctcaggtcactgctgcggtcagacgtgagctgttgcgcggtggccaggtgttctacgtgcacaaccgagtgcaagacatcgcttcggttgccgcgaagattcacgagctggtgccggaatcgcatgtcggcatcgcccatggcaagatgggggagaagcagcttgacggtgtgatccgagacttctggcatcgcgacattgatgtgctcgtatgcaccaccatcatcgaaaccggtcttgatatttccaatgcgaatacgttgatcgtcgatcatgccgaccgtttcggcctaagccagcttcatcagttgcgtggtcgtgtcgggcgaggccgtgagcgtgcctacgcgtacttcctatatgatccaaccaagccgatgacccagcagtcgcatgaccgactggccaccatcgcgcagaacactgcgctcggttcaggttttgacgtggcgatgaaggatcttgagctgcgtggcaccggcaatctgctgggcgacgagcagagcgggcatatcgagggtgttggtttcgatctgtatgtgcgcatggtgtccgaggccgtcgagcagtacaaggaaccggaacgtacggaatcggttgctgtcaccatcgatctgccgatcgaagcgtccattcccgtcagctacatcgattccgacaaattgcgattggaagcctaccgcaagttggcgggtgctcgtacggaagccgatcttgacgagttgcgtgatgagcttacggatcgttacggcaagcctccggtcgatttcgaggcgctgttcgatgtggcgagacttcggttcaaggcaaggaagttgggcattaccgaaatcatcgggcaaggccgtaacgttcgtgtcgccaaattcgagccacgagaatccgtgcaaatgcgcatggccagaatctacaagggcattcaataccgtccgatgactaaaacatacctgattcccgcgccgttcgcaggttcgctgggatctggtccaatgagctctgatgaaatcgttggttggacgaaccaattgctggatgaccttgactggaagccaacgccaaagaaatagcaggtgaagttccagacgcatccgacacgatttgtgtgagcgttcacacaaatcgtgtcggataagtttgccatacgtccacaaaacgcactattctaggcaatgtcatcacaacctaacgtttataaggagtagttgtggcagtaattgaaagcgtttacgcgcgtcagattctcgattcccgcggcaacccgaccgttgaggtcgttctcgacaccgaagacggtgctcagggcctgggcctcgttccgtccggtgcttccaccggtgaagctgaggcttgggagcgtcgcgatggcgacaagtccgtgtatcagggcaagggtgttctcaatgccgtcaaggccgtgaacgaagagatcgctccgaaggtcatcggcatggatgcttccgaccagcgcgctctcgatgaggtcatgatcgagctcgacggcaccccgaacaagggtcgtctgggcgccaacgccatcctcggcgtgtccctggctgctctgtacgcctccgctgagtccgcgggccagccgctgtaccgctacatcggcggcaccaacggccacatcctgccggttccgaacatgaacatcatgaacggtggcgctcacgctgacttcgccaccgacattcaggagtacatgatctccccgtacggcttcgacacctacagcgaggctctgcgtgcaggcgttgaggtctaccacaccctgaagaacgtcctgaagaaggaaggcctggccactggcctcggcgacgagggtggcttcgctccgaagatgaagtccaacaaggactccctgaactacatcatggacgccatctccgccgccggctacgagccgggcaagcagatcggcatctccctcgacgtggcttcctccgagttctacaacaaggagaccggcaagtaccacttcgaaggcgacgatcgtgaagccggctacatgctcgacttctacgagaacctcatcaacgagtacccgatcgtctccattgaggatccgttccaggaagaaggctgggaagactgggctgccatcaccgccaagctcggcgatcgtctgcagttcgtcggcgatgacctgctggtcaccaacccggcacgtctggctaagggcatcgagctcggcgccgccaactccctgctggtcaagctgaaccagatcggtaccgtcaccgagaccctcgacgccatcgagctggccaccaagaacggcttcacctccatggtttcccaccgttccggcgagaccccggacaccaccatctccgacttggctgtggcaaagaacaccggccagatcaagaccggtgctccggctcgtggcgagcgtattgccaagtacaaccgcctgctcgagatcgaggaggagctcggctccaccgctcagtatgctggctacagcgctttcaaggcctgcaagaagtacatcgccaagtgagcgtaagcgcatcgaatatgcgctgatgtagagtgcccgtcgtgttcctcgtcgaacgcggcgggtattttcattgctatgagttcaaagtcacgcaagaaagcatccagaaggggcagcgctggccccatcgcgttctttgtggcggtatttatcgtggctttgggatccatccagctggcgtcgacgttccatacctatgcgctgaatatggctgaattgaatggcttgaagaagcaggaagctgcgctgatagcgcaaaagcaggaactggaaaacgacattgcgcgttgggatgacaaagcttacgttacagcgcaggcaagggatcgtctgggattcgtatttccaggagaacaggcgattcgtgtggaacatcccgaagcggtgaccggcgaaaccacagaagatgcaaaaaagacggatgaatcgcagaaaaccgtactgccttggtacaaggagatggcgtattcgttcaaacaagccgaccaatcggacgaagtgaaatcgaaatcgagggaaacgtccgaaagtacgtcaaccggtgaatcggatgcgaatggaacaagccaggaatccggtggccagcagcagacttcacaagacaacaaccaacagcaatcaggagatcagcaggagtgacacagggtatgacaatcagcgaacaggccaaaaccttggcgaagaaggttctcgaccagcctgccaccgagcatgatattgctgtggtcgagcgtcagctgggtcgttacccgcgtggcatggtggctgtcggagcacgttgcgtgtgcggcaggcctttggctgtggtcacgcgtccgctgctgccgggaggtgtgcctttccctaccacttgctatttgactggcccggaagcggtgaaagccatctcccacatcgaagccgaaggcaagatgaaggagtacaacgatcttttggctgaagatgacgatctgaaagccgcctacgagcgtgcgcacgaactgtatttggcgttccggcatgaaatcgccgttgctatggaagacagcgaagagcatatcgaaggcaccagtgccggcggcatgcctgttcgcatcaagtgtctgcacgccttgctggcgcaaacgctggtgatgggtgagggcgccaatccgatcggagacatggcattggaggcgattcgtcatgaattcgaccccaatgtatgccgttgcacggtggaaaacgaagactgaaccatattcagacagaaagaagaagcaatgaaatccgttactgttgccggcattgattgcggtacgaactcgattcgtctgaaggtctcccgagtcagcgaagacggcgttgaagatattgttccgcgtattcttcgtgtgattcgcctcggtcaggatgttgataagacgcatcgtttcgccgatgaggcattggaacgtgcctacgccgctgcccgcgaattcgccgaggtgctgaaaaagcatccggtggatggcgttcgtttcgttgccacttcggccactcgtgatgctgagaaccgtgaggaattcgaagacactatcgagcagatcctcggcgtgcgtccggaagtcattcccggtacggaagaggctgatctaagcttccttggtgccacgagcgtggttcgtcgcgacgtcgaagctccgtatttggtggttgatttgggtggcggctctacggaattggtgcttggcggcgatggcgtaagccatccgaacacgcaggtgcaggccgcgttctccatgaacattggctcggtgcgtatgaccgaacgccacttgaagaacgatccgcctaccgaagcgcagattcaagaggccattgccgacatcgacgagcatatcgatgaagcgttcaaaacggttcctgcaggcaaaacccgcactatcatcggcgtgtctggcacagtgactaccatgaccgctctggccatgggattgaccgaatacgaccattccgcggtggatggtgccagctgctcgctggaagacgcttatgcggtcgataacaagttccttacgatgccgcgcgaagagcgcctgacctacaaaaccattcacccgggtcgtgttgacgtggtcggcggcggtgcactggtgtggaatcgtgtgctcgccaaagtcagcgaagcggcctatgccgaccatggtcagcatatcgactccttcatggccagcgagcacggtttgcttgatggcattgtgttggattacggcacgcgattgcttgccgaacgttaacgtggcataataacttgggcgtcggcttgttcgatgccttgccgccatggcgaaactggtatacgcaaccgacttaaaatcggtctcttcggattgcgggttcgattcccgctggcggcaccgaatgacgttgtgaaatattgctggatagcacgtacgaaacaatccgttattacactggcggcattgataaccccaagtagccgactggaacggaaaaagtatgacgtcgaaagatatcaagccagtaatcgaacagcccgatacgggaattccgctgatgctctcccaagcgattatcgtcgcaggagttttggctgtgggcgaactggcttgttctccgctgtatttctcgttgttgaaggcgtcgttggcattgattccatgggctatggaagcggtgttcatggcagtggcgttcacgttcgttgtgggctttgcgctgctgtggtgcgccgaatcgttcacgctcaaaatgcgtgaacgattccgaccgttcgcatatgcgattgttggacttatcggttacggtgcgtggagcctgctggtgttctccgccaccatcaattccgtgcttgccatggtgggggagagtgtgctcaccaatggccagattggtgcgattgcgttgaatggcgcagcgcttggtttcgtcgctttcctgttcgccaagttactggacgttaaactcggcaatcgtaaaaccacggccattatcatgctggtggtggaagttacggccgccatcattggtttgatcattatgattctcatgttccgtgcattgtatgcagcctgagcaaggcacctgagaagcaaggcgacgattggtatgttcagtattctcgaaatgttcaagataggcgttggaccaagttcctcacatactgttggtccgatggtggcggcatgcaaatttgtcgaatcacttgaacatacgggaacgcttggccgtgtgagccgcgtgcgtacggtactgtatggatctcttgcgttgacgggtttggggcacggtaccgatcgcgcgactgtggcaggtctggaaggtaacatgccgcaaaccgtcgatacggaccatgtgaacatcattcgtcatgaatgcgagtcgagtggggaactgctgctggccggtaagcatcgcatcgatttcgactatgcgcatgatgtggcgatggacgtgtggcatcgcttggccgcgcaccctaatggcatgcgtttccaggcatttgaccagcagaacaatcttgttgatgaacaggtctggtattccatcggtggaggcttcgtacggcaaggcaatgccgaggatctgatgatcggcattcatgagcgtccgccgatcggaacgtctttcgccgatcagcagagtgattcctcacttgatgacggctcggatgtgccatatccattcacgtcatgcgacgaactcattgcattatgcgagaagcaccatatgagtatcgccgacattgtgtgggccaacgaaacggccatgcagtcggcggtgcaggttcgcagtgaactggataacgtgtggcgggtgatgcgtcgttgcgtacagcacggatgccatacgtcgcagaccgtgttgcccggcggtttgaatgcgccccgcagggcaccgaaaatgtatgcaaggcttgcctcgaacagtgatgtgcttgcgcgagacaagaaacgcgcggatgcggtgctcgaatcgtcggatgcggcatgggtggatttgttcgctttggcggtgtcggaggaaaacgccggcggtgggcgaatcgtcaccgcaccgaccaacggtgctgcaggaatcattccggcagtgcttcactattactggcatttcgttgaccatgcgaacgaagagggtgttattaccttcctgctcactgcaggcgcggtagggtacctgtttaaacgcaatgcctccatttccggtgcggaagtcggatgtcagggagaagtcggtacggcatgttcgatggctgcggccggtttgtgcgcggtgatgggcggtactccacagcaagtggagaacgctgcggaaatcggcatcgagcataatctggggctgacctgtgatcccgtgggaggtttagtacagattccatgcatcgaacgcaacgccatggctgcgaacactgccatcaacgcggttcgtatggccatgctgggagatggaacgcatatcgtgaccctcgatcaggccattaaaaccatgaaagacacgggcgaagacatgatgtccaagtataaagaaacctcaaaaggtggtttggcggtcaatgtcgttgaatgctagcggtggttggtgctagtctaggtggcattgtgcttttcaaggaggttcaccatggcatctcaaatgcccgttgtcaatgttgagttcggcgatcgcccgaccatcgaattcccgtctgagaccgctccggcaggtctgaaggttgtggagctgctcgagggcaatggcccgatggttcgccgcggcgacaccgtcaccgttaactatcacggtgtggtctggggcaaagacaccccgttcgattccagcttcgaccgtcaccagccggccagcttcggcatcggtgtcggccaggtcatcaagggttgggaccagaccgttccggggcacaacgtcggttcccgcttggtggtatccattccgccggagtatggctatggttcccgtggcgttccgcaggccggcatcggcggcgaagacaccctggtgttcgtgatcgacatcatctccacccgctgaaactaagcggcatagagtaatttccaaggtcaaggaggcaacatggccgaagaaaaaacgcttctgctgacgcaggaagcttatgacaagatgaaggaagagctcgcttggcgcgaaggcgagtatcgcgacgaaatcctttccaaggtttccgcggcacgcgccgagggcgatttgagcgaaaacggcggctatcaggccgctcgtgaggctcagcgagtaaatcagggccgcatcgaggaactgaccgtcaagctgcgcaacgcgaagattctgaccgcgcccaaggccggcgaagtcggcgacggttctttggtgacgctggatgtcaacggacgtgaaatggtctacgtgcttggcacgcgtgacctgtccatcgccacggactacagcatcatcagcccggaatccccgatcggcgcggccatcaacggcgctcacgagggagacacggtgtcgtatacggctccgaacggacgtgagatttccgtgaccatcaaggaagccaagccgctcgcctgagtgatgttcgtcataagctgaatctgatattccagcgatataaatacaaggctggttcacgaatacaacggatgaaccagccttttcgtatatttcgtcaaactgcaatcagatatgatctgaacttacggccatagctgcacgatcaccatgtagatcgccaccatatggcatgcgtaaccggcaacggtgccgcagtggaaaatctcatggaagccgaacaccttcggccatggatcgggcttacgtagcgcgtatacgatggctccggcgatatagcaggctccgcctgcggccaacagcaccacaaccgccggaccggcatatggcgaaatccagaacaatcccatgaatgccactccggaaacaccgaaaataatatacacaatcacgtaaagccagcgtggggcgctgatccagatgacgtgaatgatgagcgccacggtagtgcagatccacatgcccgcgatgattgaattgcgccagaacggttcgagtgcaaaggagaccggcgtataagtgcctgcgatcagcaggaagatattcatatggtcgatgcgtcgtagcacatccgtgacgcgaggtgaccaatcgcccaaatggtagcaggcggaattgccgaacaataccagcgaacacgtcatgaacacggcgcaggcccacttcaaaccggtaccgtgtgccaggcagatcagcacgatgccggccgccaatgccagaggagtggccacggcatgaatccagccgcgcatcgccggcttggggcgaccatgcacgtcaagacgaatcttacgttcgatctccgtcggagtgatgccttctattttcgcggcacgagcttcgcccttggctatagccattttcgccttgccgtcggccttcttgcggatgttctcggccttgttgcgtgccttcacgcgaataatatcggccttggcttgaagggcctgttcgcgtgcctcggcgatgatcgctcgtttttcctcgatctctacgtctgtgggtttcgccatctgtgtgcctccactgtaagttacggaaccgtaacctacgttaccgtaactcatggatatgtcaatattgcttttcctgcaatatgcgtcgtgtcgtgcaaaacctctggtgtgatgcgtatgatggagcgcatggctgatttctcacatatcttgacgacccgtcccgatttcgatgacgaagatcgtgaatggctgcatcatctggtcgccgactggcaggtgatcgccgacctgagttttgctgatctgctgctcattctgcaaaatggcgagggcaaatacattattgccgaacagtgtcgtccatccacggtgatgagcctgagggccgacgatgtggtcggcgacgttgtcgaggaggaaatgagcgctgaattggatgccgcgatggcttccgaatcggtgttccgttccacggtgctccgcactgtgggcgagtccacggtgtgcaatgtgtatgcgccggtgcgtcataatggcaagacgctgggcttggtggtacgtgagacgaatatggccacccgggagtcgaacggacgttacgaatccgaaagcatcagcgcaggtaagcagctgtatgagatgattcctcgcggtcagttcccatatcgtaatccgattatgaaccagcgtcacaatgcgcgtgtggcggacggcttcatcgtgctcaccgtcgaaggtatcgtgcgatatgcttcgccgaatgccatcagctgcttccgacgtttgggatcggtcagcaccatgcagggggagtatctgagcgaaatcggcaccaaattgctgcgcgagaacgatcccgtgctggaaaccttgcctctggtgctcagtggcaaagccgccgtcgattccgaactcgatgccaacaagtccgcggtgtccatgcgttcgctgccgttgatggatgccaatggccgcgttggcgctgttgtgctatgtcgcgacgtgactgagcttcgccgtcgtgaaaaggaactgcagaccaaggatgcgacgatttccgaaatccaccatcgcgtcaagaacaaccttcaggcggtttccgcattgctgcgactgcaggcacgtaagaccaagtccgaagaggtcaagaaagagctgaaagaggcgcagcgtcgtgtacaaaccatcgccatggtccatgaaggcttgagccagaccgccgatgaaatcgtcgattacgacaaggtcatttccagcctgttgaagatggcggtggatttggccaccatgcgtgaccagcatatcgacatcgacttcatcggcagattcggcatgatgccggcgcaggatgccacgccgttgtcattggtgctgaccgagctgatcaccaattccgtggaacatggcttcgaaggccgcaaagaaggtcatatcacgatttccgtgggacgcggtggcaacaacctcaatgttgtggtcgaagacgatggcacgggcttggccaatgaggagcatgatggtatggcacgttcctccggatccggtttgggaacgcagatcatcagcacgttcgtcaacaacgatttcggaggcacggtccgttgggagccccgtcgtggcggtggcacccgagtagtgctcgatatgaagctgcgtgcggcgcaggaacgataggaaagatacgaaaatgtccggttgaccaggggaagtcaaccggacattttcgttgtaagtcgctattcgcagagcgtatgcaatgatggatctttgaaaatttcagatctgcatctgcatggcttgggagcggcgggcacgcatggcacggcgcttgagcgcacgacgttcgtcttcgctcaaaccgccccaaacaccgtaatcctgattggtgtcaagcgcgcacttcaggcacgcgtcaatcaccttgcaggtgcggcagacggccttggcctcttcgatctgctgataggcggcgcctgtattgccgaccgggaaaaacagctccggatccttgtcgcggcatgcggccttggcgcgccagtcaaaagcactgctcatataatcgccttcctcttgccatgtacggcatgtaagtccgttactcagataaccacgaatcgcgcgacttttcaagagtcttcgcgaaaagaatcccacgaatcgttaaaaaccttggaattccacgcactgaatagggcatgctttggcctgttgcatgagcacgccacgacctgggagggtatagtcgtcggctgcgaacccgtccagaattgcgccgggaatgccgagcatcagatcgttggaacgttctccgcaggggaacgccacacgagtcggacatcggtccagcagtgcggaaataggtttttccaccgcggcaatcactgtgatattgggattgaccaacgcctcacgcaattcgttcgcttcaggcgcagaggaaaagggattaagcgcttcgtccgcatcatccacaatccagatggttcgcttatgcgacggtaagggtttgccgtcatccgtcaccatgccatgttcggttttgcgtgtgaaacgaatattggcgcaacccgtgtcatatagccagcgtgcgcaatgcaacagtagattggttttgccgctgccgtaggcaccgatgatggcgatattctgttggctcacgtcaagaatggcggtatacaccaatacgccatcgtcggcaagcgcaaagggaacgttatgccatgactggtttgatgggatggaaagatcggattgcgttgcatgttgcgtgagaggctcggaaaacaggagatcggggcgtttgcaggcgtggaatcgtgcggccgttccaatattacggacaagtcggttgacatcgcggaccgcgctgcataggaaaggtgtggtgtgttgtccgtcattgcaataggctgcaccgggaatgctgggaggaatcagcgctgcgtcacgtatgccgatcaattcgttcgactgcatttggtctgtaacccgtaagcatatgctcagcgagatattggctttcatgtcggcatggacttggcccatgggatattgcgtgcagacgatcagatgcatgccaagggaacggccaagtgacgcaagacgattcagccgttgcatatagtcgggcagacggtctcgaagcgcatggaattcatcgatgaccacaaccagtcgtgccggaggccggaccaattggtcgaatctggaaacacgttcggcgctgaccagagcctcacgacgcaccaattcctgttcaatggcattcaacgcgcgaatcgcgtggaacaaatcaagatcgcagacattgccaacggtgtggggaagatgttccaaagcgttgaatgtcgatcctcctttgaaatccaaaaacacaaaatgcagatcatcagggctgtattgcatggcgagcgacaagcaccaactgatgagcaattccgattttcccgaacccgtggtgcctgctaccatggcatgcggtcctgatcgttgcagatccgtgcgaaacaagccatgctccgtgactcctatagggcaggatgatgtggaggaaagccatgttcgtgtgatggtgcgccaaggcagcgcgtcctcgtccagagcgtagaatcgctcgaaacacatatggggcattgcggcgaacggcgaatggctgttttgccttgcggtctccaccacctttgcataggtggtggagaccggttcgtcatgctgctgcttctgattggaacgcaacgccatggatgccagagacaacgcgctgctgatgagtccaggagcaagcatggccacatatagccattgccgttgcgcgctcattatgacaagcatgacgagctgtgccagcacaggtgcggaccaactgatgagcatcagccggtcttcattgaatccatcggtatgcttgcgtttgttcttgcccttcatacccgccatagtgggcaatgcggatgagcgggtgcaagctgaaaccagggttgtggtcggaggatgagttatccacatcctccgaccggaatatcagccctgctgttcggcaagcgtgcctacagtgccagcccgatgggtccccttagccaattcggagaacaattcgaggttcttctcctcatccaacagcacgcttgagccgacaccatcaacgtagtagtcgggatcggtccaataaacgcttcccgaaatgccttgatccccagaagcgcttttgaacgccaaagccatgcgcatcagcgatgaggtcgaagctttctcatccacggtcacggagcttaacgccgcttccgcgacttttttgaccttgccgaagttcagaagcgtattcttggatgcgccctttttcactatggcgttgatgacctggcgctgacgggccgcacgcccgaaatcgccttgcgcgtcggcgtaacgcatacgagagaacgcaagcgcggtggtgccgtcggcggtatggcagccggcagtccagttcaactgggagtacggatcgcttacatcctggtcgtagcataattcgacgcctcctaaagcgtcgaccactttgaccaggccgccgaactgcaccattgccacgtggttgattttttgcccggtgatgtcttcgacttcgttaaccagttgtttgccgttgtacagttgggcgacggcgttgattttcatgtaactctggtcgatttccaccaaggaatcacgcggaatggaaatcagtgaggaaggtccggatttcggtttggtgagtaccagaatggtgtctgttctgaaaccggtcacgtcgccagcgtcaccaacggtgccttcgcgttcgtcggaaccgaggatcagccagctttcgccagcggtatcggctttgttcgtcaaccaagactgtttgttgagctgtccatccacccaattccatgcggagaatatcgacagtcccaaggcgagaatcacagcaaggaaaaacgcgagaatgacccgccccatatgtcgttttctgtgggggagcacggctttcgcagtggattggaatcctgttgtgctattgccggacaaaggttgtctgggcgtgttctgtcgcgttgttcgtggcatgccagtgggtatggaggaggatcctcgtacctgctgagacgcacggtgattgttcggagctgaagcaggagcaaacgatgcaggagacgatgatgccgacttacgtggtctgctggtggagtttgcggcaggacggaaactctgtggaacgctggaaccggatggagttacggatgatggttgcgctgtacgcctgctggcgtgcggggcacttgagcgcgctggctgtgcggcaggcgaaaaacttggaattgacggagagccggattgagaaggaattgtggatttgtgaggctgtgattccgtcttcttccgtcctgcggacgggatgaagctcggtggtgcgggcatggggtccttgccgccgttctcttcactcatacaaatatcctccaaaaagaaatccgttcctacaccatttacaccgtgcaggaacggattcggtgaaagcggtctagttctttgcgggaacggcacaaaccgtcgcgttgaggtaacggtcggcaagcccgatgtactgcccggtaagagcgtcatgaatggaaccatcttcagggtcgaccgtgccgccggtgttcggatcgatcagcgtgccatcggcctgcgtgatcagaccagtgaccggatcgggtgttggcgcggcttcctgggaacccgtgttgtcagtgcccgtattatccgtattgtcagtgccatccgtcgaattatcggaagaaccgtcggaattgcctgcggtattggcatccgtgttcgcgtcggattcgtcggaaccataaatcggcttgtccgcgcgcatcttctcccatagcgtctccgcctcatcggtccagaccgaacgattcgggtccgacggcgcggatactaccggaacggtctgcgaatacaggctggacagattgaaatccttgaggctcatggcaagacctgcaagcgctgcggtatcggccatgccttgcgagatatagagtgattgcaaggctgatttcgctagctggtagagctgtgcggtgtcagtaaagaggttcttgctgagcgcttcgttcatcaactgtttgatgaggtattgctgtctggttgttcgtgatgtgtcggatccgtctcccagaccatggcgggttcgtgcgtactgcgttgcctggtgtccgtccagatggtgcaggcccttggtgagttgcaggctggtgtaggggtcgtcgacgtcctgtgggatgcacaggtcgactccgcctacggcattgatcattttgaccagtcctgcgaaatccacgacgatgaagttttgaatgttcagtccggtgaggctgttcactgcattcagggtgcagcttgcggctgaagcgagatcgccgccggtctggtatgcgttcgcgaaaatcgagttgaacatcacattgtattgcgcgggaatcgtgccgttggtcgtttcgcactgcggtatgtccactagggagtcgcgcggaatggaaacgagattgattttggtgcggtccgcggaaatctgcgccaccattgtggtgtcggcctgatggttgcctaccacgtcgtcgaagttgcctccgacggactggttctcttcgccatcgcgggaatcctgcccgataagtacgaattcgatgggtttgccggagttgggatcgatgatcgaggtgttggcgtcaagtgagccttgtccgatgatttcgaccgaatggtctttgatgatgccattcacatccagccatgttgcggccgctgcggttcccgagaacaccagcatcgccgcgatgaccgaagcgactatcgtcctcgcacgatgctgcactcgatagccaaggctgtgacgcggctttgcgtctcgcagtccattgacgttaggaagcttatcgccggctggtgatgtggtcacggtatcgccttcctgtttatacaaaagatcacgccatatctcaacgcgttctagaacataccactactctgtcatgggattatagagatgttccccgattttcacggattctgcttcaggcccccgtcgttcttggaggtaccatgtaccatatttttctcgaattatagtgattgacacggcggaaaacttgacaaaaagaaattgcatgtgtgtaatttaacacgactaaaagtgcgcatacgtatagcaggggaggacgcatgtggggcgtgatcgacgagtcctccgataatccgcttgcggaactgtggggtctgttcaaaagcgatgatgatgtttcctggcagcatagggctttatgttctcagactgatccggaagcgttctttcctgaaaagggcggatcaaccagggatgccaagcgagtgtgcgcccagtgcgaggttcgtgagcaatgcctgaaatgggccatcgagcatgatgagcgtttcggcatttggggtggcatgagcgaacgtgagcgccgtcggtataagaaggaacacaaggaacgggcataacgcacggcacaccctgtgcgtacacttgaaattatgaattctaacgccagcagcgatatccagggaattgtgaccgatctgctcaacagcaggccgtactcccatcggcaggatgccgattcatccgtggctgcggtgattaccgcgcaaagcgatctgcgttttttctcatccacttttgccgcggtgctcgcacagcgtgtgcttccaggcactattatcgttgcggattgcaccaatcaggttgagcagcctatgcagatgacgtttagcgttatcccgtcgcctgccggtgtgcttacggaagttcccgaaagcaagaccatacgtgtcattctcgtaggagtgaagggtgcctcttcattcatgaatgccgtggctcgtgcaatgcaacagatcgatcttgacgaccgggtcggtgctctgtggacattgcatgacgattccaggccggccgatgagtcatgccttgaggtgttgctcgatgcttggaaaaacacgccgactgcgtctttgcttggcgcgaaacagttggattggcaggcggaaagcctgcataacgtcggtttgtatgcggggcaccacaatgtcacgtctctggtggtggacggtgagccggatcaggaacagtatgatggccggcaggatgtgttggctgtgtcgctttccggcgcgctggttccattggccaccttgcgtacttggaagggtgccgatccatggttcggcacgttcgccgaatccacggacctgtgcaggcgcatctgcctgggcggtggccgtgtggtggtggtcccgcaggcgcgaatcgcccataggagggcaagatttgaaggcgtgcgttccaaaaacggccaacctgttgaagatgaggaaggccgcgtcgatccgtaccttgcggtacgcgaggcgaatacgaaatacgcgtatacggacgtgcatcgttcttggtggccgctgctgtggatctggtcgatactgaaggcgttgggactggccgtgctgtgcctgacgcgcaaacagccataccatgcctgttgcgaattggccctgccttggcgttcgttgctccacttgccgggcgcatggagggcccgtgcccgattgcgtgagcagagtagggtctccttgaaggcattggccgcattgcagacgactcgtcagcagatcggccaatggaacgatcgcaagcgtgcgtttcttgaccagcgtggcactgtgatcctcagccctcttgccaaggcgcatctgcgtaaaaggctcatgcgcaggtgggggcttgccatcgcatcggcggtgatcgcgttcgcatggatcgtcttcctatattggaatgtgcttcggagcgtgttctccggcgcgtcgatatattctcaaacgttgctgccgaccgatgccagtttcagccagttggtgcatgccgccaccacgtcgtgggcgtataccgcgggaacgggaatcagcgccccgagcgcgccttggctgctggtgctcatggtggtttccgtattcacggctggccatgttgcgaccgcagtcgccgtggtgttcttcttgtccgctcctttgatggtgctgtcgttctgggctttggctggaatctttactcggtccgacacggtgcgttgcgtgatcgcgttggcatggttcgccatcgcattgtcgatgaacgtgtacagcgatgccgacgtgacgatgatgacggtcatggtgtttcttcctgcggccttcgcgttttctttccgagccgtaggcatgtaccgtacggaagatctggtcaatccgcaggcttccgtgcaggccgcggcgcttgcggcattgtgctttattcccgtcgtcgcggccgaaccgcaattgctgctgccgctgatgttgtcgttccttgtgttcctgatgcttgtacgctcccatagaacgacgctgctgctgattccgctgccggccgcttccgtatgcgcgcccacattggtcaacacggtacgtttcgcaggagcaggtacgtggcgtcagatttttggcagtgtgatattgccgtcgtctgcgcatgatgggcatccgatgatcgcaaatctttcggatattgtttcccgtgcgttcggcgttgccgtatccggcgagatttggcagtatgtggctgctgcaatgttggcattgattgtgcttcttgccgcggtatcgctgttcctgccattcgtgcttcgcgtgtcgcgtatgatgtgggtcgtggcgatcgcgggtcttgccacgtcgctgctttccgccgcggttgtggttgcggtcgatgcggatggcgccgtggccggttccgtgcttcccggcgtttcattcacgatgatgggactgctgtcttgcgtgtgcatggtcgcaggcggtgcggtgcaacgtttcgtcatgctgtggcagaggcccaccggcgatgtcgaagttgagaggaatggcgcttctactggcattattgccgggcgtgcggcacgaatcgtgctggtcatgctgattgcggcgtcggttgtggcgagtgccggttttgattatgtcgccagagaccataacacggtttcgaccagtgattccggtttgccgattgttgcttccgactatcttgcgcaggatgaggcgaggcgtgtgctcgcagtacgcgcggatagtgccggttccatcagctacaatgtgatgcgcacccgccgaggtgatttgatcgacagctctccggcacagcgtgtcgaagtggcgttcggacgttccgatgatgcgaacaaggccatcgccaaggattgcgcgcagctgttgtcgaacgctgattccgacgccgtcgccgatttgagcgagttgggattcggaggcatctatgtggtgcgctccggcgaagacaaggcgcaaaaggagataaccgatcagttgagttccaatatcagcgcttccgatggcacgcagaatgtcgtaagcactgatgcgggaacatactatcgtctcaccatccaagatacggccaagcagcatatcgaccgcaagggatatcgacaggctgaatcgagtgtgtggcgtcaggcatggctgtggtgcatgggtattgttctcgcagcgtattgcttggttgcgcttccgcgcatgaggcgtcacggtcaggaggaagcatgagcaaacattcccgttccaaaacggtttggcgtgtaattctggccatagtgtcggtgttggtcattgtcgcactggcgaccgtggccgtaatctaccgcccgacttggattcatgcggattcgccggtaacgcagcgttcatccgtatcccgcaccgtcagtccgcgtcagctggaaacatattgtccagcacgaatgacgatagctgatactgatgtgtatggagacagcgaatatcaagcgtccaacggcaatatcatgtcgtcggcgcgttatgcgtccttcggttcggtgttccgctcttccgtagggcttctcggagctgatgaagccacttcgtcattggtgttgaacaaggatgatgccggatcggatgatgatattttcatggcgtccggcacggtcgatgacggagcccaattgcagaatacccgattgctgtcggcttccgatggaacgggagcggcctcttcggtgatgtcttgggctactgagggagatttgaaaggcgtttccgctgcttcctgcgtcgttccggctttgaagcagtcgctgatggtgtcgggcaccaaaacaggcatgacccagcagctggtcgtggccaatccgtcggctaaggccacgtcggtgaacatcaaggtttggggatccgacaagtcgggtgctttggcattgtctaccggttcgacgttgacggttggcgcgggcaaggaatctgtgctgaaccttgccgcagcagcttccgggcaggatgctttgtacgttaccgtgtccagcgtggacacgcccgttgcggccgtggtgcgcaccatagccatggatggtctggttgcaaaaggatcggattatgcggttcccaatactgttgccgcaaaaacattggcgattgacggactcacggaaggcgatgccgtcaacctgtatgtgtatccgtctcggcaggccgacgtcaccgtatcttggacggatgaccaaggtctgaagaaaaccaatcagcagacgctcgaatcgaatcgcgtttcggtcatcgacctgggttcggttcccaagtcggcgaccggacttaccatcagcgccagcgagccggtatccgtcgccgcgaagatcaccaatgatggcgatgatgaccaggctgatttcgccttggtcaacgcttcagtgccgatgagcgtctccgccatggccgtgcccgaccatgccacggctcaagtgggcatcaccaacatatcgggcgatgagcgcacggcaacattgacgtcctataacagtgtcggagatactgttgaccagcgcgagattgctctccaatccggcgcttcgacaacggttgatctggcggatatcaacgatggagacgttgccgccgtaagctttgccgatccggaccaatcaatggtgtggaacatccgtatcagccaaaaagacgtatcggatgcgaaactggccggagtgtcgattatcggcgcaacggatctgaaggaagcccgcgagcaggtgctggccaaccagaacatgaccgtcgtgcgttgatcacataccccaatcggggtcgatctcttcgggacggcgtccatacagttccgccaagcgcaacaccacttcgtcgcggatggcgaattgcaggtccatacggcttcgcgcatgcgattgcaaaggcatacggtacagcacgacgcgcggcggaatgccatgttccgcggggaaagactgcgagcccaagtgcgcagtggcctcccaaggtgccgggtcggatggcggaacgtcctcgaccgcaaactgtaccggtgccaccagttcgggccatgcatcgttgagcctacggatctgagccaccagcatgtcgtcgaacataccgcttcttgtacgataacgtggaagtctggtaccgaacatgggagtgcgggtcccacgaccatgacggtttctatacactgttgattcccaaggcaattgatacatggcttctaccatatcagggccttgcgcgaatcatgcgatagcatattgttcattgcatcgacacaggaggaaacgatcatgacggatatttccgtgccctgttggaacgacgtggatatcgaggaattgtgcaatggagtacgccttatcgccttcgatctcgacaacacgttggcaaggtcgaaaaagccaatgaaggacgacatggccgaatgcttctccgcattgacatcgttgattgatgtcgcggtgatcaccggtggcaagtatgcattgctgaaaagtcaggtggtggaacggttgacaggtcaagccaatcggtcgcatctgcatcttatgccgaccagcggcacccgatattaccgttggggcggatcggattgggcgccggtcttcgcccatgacctcagcgcggatgatcgtgcgaaagcttacgaatcgttggaacgcaatgcgcgcgaacagggtatctggctcacgcacgtttggggtgaacgtatcgaggatcgtggcagccagatcacattctccgcattagggcagcttgcgcccatcgaagccaaggaggcgtgggatccaaccaacgagaagaagaatcgtctggcacgagcggttgccgccgatctaccgcatttggaggtacggccgggcggcgccagcagcgtcgatatctccgaaaaaaacgtcgacaagtcgttcgctgttcgagaattggccgatattctcggcattacggtggcgcagattgtttttgtgggagaccgtatggatccggacggtaacgattatcccgcggcaaaggcaggcaccagggcggtgaaggttacctgtccgaacgataccgtgaaattgtgcggtggaatcatcgccagtctatcgcgatagaacctgttgggaggtttcgcatgaactcaatggcgagggcatgctcgatggtggttaatctgctgtttccccggggctgcgccgggtgcgacaaaccggatgaagtgctatgcgaagcttgcagggcattgttttcccagccgaccgcacagtcgtttgacggtgtggcgatgcaacgctggttcgcatgcggatggtaccgtggcacggtcagaaaggcggttctcgcgtggaaggatcacggcgacgaggaatgtgaccgtgcgttcgccgatgcgatatgcgcccttgcaaaagcgtctggcgttattgacttcgttcgtgataggcatggttcatgccatgatgttgttgtggttcccgcgccttcgtctcccgcttcaatacgtcgtcgcggacgtaaacatatgatgccgatcgccaaacatctggcaggttttctacgggaggaaacaggctgcgaggtgacggtgcgtgacgcgttggagaacaggggggtcaaagggaaatcagtgcagaccagcggtgcggcgcaacggtcgcaacgtttgaaggggcatgtttcggtgcgtccttcggtttccttgcgcaatacgatggtgattctggtggatgatattgtcacgaccggtgcgaccatgcgcagttgcgtcgaaacgatgcggaaggagggtgccacggtcgtgaccgtgcttgctttggctcacactccggcgggaacgcagaaggttggcccaacgcaagcatggtcacgcacgcaagtgcagtgacgtgagaaatcctctattcgtcatccgtaacatggtatttcggcagaatgatttcaaaatcggctccacgcgggtcatcgacgaccctcaccgaaccaccgtgcaactgggcggcccaacgtgcgatggacaatcccaagccggttccgcccgattcggtgcccggacctgtttttcctttgacgaaacggcggaaaatgtcggaacgcgcctcttgtggaatctgcgatccgaaattgacgacattggtgacgatggtgccgaaatccttgttttcgtgtgcttcgataagcaccgtggtattgtccgcggaatgcttgagcgcgttcgcgatgatattggtgaacagttggcgcaggcggtcctgatcgcctgccatctcgatatcgtcgggcacatgcatttcgatgtcatgcgcatgcccggcatcggcgatttccaaaggttccacggtttcgtcaagaaaatcggcgaaattgaacatttcgatttgcaggcttgccgcgccggcttccatgcgggaaagatcaagaaggaacgcgatcagatcggacaggcggtgcgtctgattgaggatgctttccagatttgatggcgtagggtcgatcacgccatccgccatgttttcgaccatggcttgaagcgctgatacgggcgtgcgtaattcgtggcttacgttggctaccatgtcccggcgcatctggtcggcatgctgaagctcttccgccatttcgttgaaggtgagggcgagctggccgacttcatcgcgactattggagtcgacatggacgcgcacggtgtaatcgccttccgccatcgcttcggcggcgtcgcgcatttggcgcaggggagaggtgagtcctctggagaagaaatatgtgattcctaaagccacggcgagggtaatgggcatggcgatccatacgctgagccctactttgagcaggaaccacgccatgatgaacgcaatggcggtggagatggtgatcagaacgctcaattcaattttgagcgatgagaacaaaccaataggacgttcggtttccaatggattcaccgaacgccctggttttgtatcggtagtacgcataccaccgaattttagcgcattagtcttggacttctggcggttcgaacgcgtaaccgacgccatgcacggtacgaatggtcttcgaaccgagcttatggcgcaatgccttgacgtgcgaatcgacggtgcgagtgccggaagcatccacccaatcccacacttcctcgagcagtttctcgcgagtgagcacggacttcggcttgcgggccagcgtggccagcaaatcgaattccgtaggggtcaggtgcacctgcttgccattgacggtgacgatacgttgcgcgggatcgatgaccaaggagccgaaatcgagaagcttctcgttttcggagtttttggcgatgaccttggcacgatctacacggcgcagcaacgccttgcaacgggcgatgagttcgcgcatggagaacggcttggtcatgtagtcatcggctccggcaccgaggccgatgaccttatcggcctcgtcgtctcgtgccgtcaggatcagcactggcacagggcgctccgccacgatgcgtttcgtggcctcaagaccatccatcacgggcaacatgatgtccatgatgaccagatccggacgcaacgtagtcgcggcctgaaccgcactggcgccgtcggatgccacgcgcgccgtccagccttccgctgtgatgcgctgcgcgatggcagtggccagtgtcggctcgtcttcgaccaccagaacggtgcgtggagccgttgtgggttgtgctgatgagttgagcatagctttccgcctttctcagagttccggcttcaagaatactgcgcccagtgccggaacggtgattttcgcggaccaatcacgtgaatggtattcgccttcgatcgcttcgaccgtgccattgtgaatgccggaaccgccgtagatctcatcatccgtggtcagcacttcggtccatttgccgcccttggtgagcggtacctgatagtcggtccatgcctcgccggagaagttcaccacaaccaccatttgctctccgtccttgccgatacgcacgaagctgagcgtgttgtgatcggcgtcatcgctggtgagccactggaagccggccgggtcgaagtcttggctccaaagtgcaggggaagccttgtacagcgtgttcaaatccgcgacaagcttttgcacaccctggtggtccggccattcaagcgcggcccaatccacggaaccatcatgatcccactcgccgtactgggcgatctcattgcccatgaaggtgaggttcttgcccgggtgggcccactggtaggcgaacagcgcgcggacaccggcatacttctgccaatcattgcccggcatcttgccgaacatggatcccttgccgtacacaacctcatcgtggctgatcggcagcacataatgctccgaataggcgtacaccatggagaacgtgatctcgttgtggtgccacttgcggttaatcggctcctcatgcagatactgcagggtgtcgtgcatccaacccatgttccacttgaggccgaatcccaaaccaccggcgtcggtcggcgcggtgatgcctgggtaagccgtggattcctcggcgatcatcatgatgcccggattgttcttgtatgccgtggcgttggcttccttgaggaagtcgatggcttcgagattctcgcggccgccgtagatgttcggatgccactggccggcctcacggctgtagtccaggtacagcatcgaggagaccgcgtccacacgaagcgcgtcgatatggaactcatccagccagaagcaggcgttggccaccaggaagttacggacctcgcgacgtccgaaattgaacacgtacgtgccccaatccgggtgctcgccacgagtcggatccggatcctcatacaacggcgtgccgtcgaagcggcccagtgcgaacgcatccttcgggaagtgggccggaacccaatccatgatcacaccgatgccggcctcgtgcaatttctcaacaagatacttgaaatcgtcggggccacccaaacgcgaatcgatcgcgtagtagccggtcacctgataaccccaagatcctgcgaacggatgttccgccaacggcatgaactccacgtgcgtgaagccttccttctgcacgtagggaaccagcttgtcggcaagctcacggtagtcgttcacgtccttgcgccagctggaggcgttcacctcatagatgctgaccggtccgttatgcgggtcgctggccgcgcgttcggccatccaatcggcatcatcccattcatgggtggattcgaccacgatggatccggtgcgcggcggaatctcgtgggagcgctccatcggatcggccttcatggtccattcgttattggcgttgaggatttcatacttgtagatttcgccggcctcaatgcctgggatgaacagttcccaaatgccggaagaaccaagttcgcgcatggcgtgggtacgtccgttccagccattgaaatcgccgaccacgcgcacggcatgcgcgtttggcgcccatacggtgaacgcggtgccaaccacctgctcgccatctacgccttcagaagaacccatcggatcgtcatagcggagcacatgtgcgccaagtgcctcccacaggcgctcgtgacggccttcgccgaatagatacatgtccatctcgccgatggtcggcagataacgatagggatcgtcagacaccacaacggaaccgtcttcatactccgtgcgaatacggtaatctggcacgccgtacccctcttctgctgcggcggcgggaacgagtgccatgaagacgccattgtattcatggattgcgagcgtttgaccttgttcagtgataatcgtcacggattttgccaacggacgcaagactcggatcgtgacgacatccgcatgcttgccggaaccgaggtgcccgccgagcacctcgtgaggattgtagaacgtaccgttgcttactgcatccagtgtgccctggggaacaggaacagcaacgacatcttcattgatcttggattctgtagccatggcaaaagtgtaagcatgaaacggaagaaaagtggcccgtgtcgcgcctatttttccgtttttcaagtgtttttggccaagtccacccctgatggcacaataattcgggttttgtgtaagcttttcacggaggattcatgggttacaaggtcggcgacatggtcgtctatccacgtcacggcgctgcgaaggtggaggccatcaccgaacggacagtcaagggaatcacccgcgaatatctgcagctgtcggtgctttcgtctgacggtctggtcatcaacgttcctgttgataatgccaaaaaggttggtgtgcgagatatcgtcgacgccaacgaagtggccaaggtgttcgagattctgcgcactccgatcattgagaaggagatgaactggtctcgtcgctacaagctgaatgtcgagaagatcgccaccggcgatgtcaataaaattgcggaagtggtgcgtgaccttgcgcagcgtgatgttgacgaacatggtctgtcggctggtgagaagcgcatgcttaccaaggcccgtagcattctgacttccgagatttcgctgtccgaacaccttgatgaagccgaggcccagcgtttgctggacgtgaaccttgggtatgagccggcccagcccggcgatgaggagcatcataccgaggctcccgaggaggctgccatggatacgctggcccgagttgaggccgaaagcaagaagtccaagaagaggtaaggcgtttcatgcgtatcggtcagggttttgacgctcatcgattcgcatctcacgatgcaggcaagccgttatggcttgcctgtttgcgttgggagggcgatggcatcgagggcgattcggatggcgatgtcgccgctcatgcgttgattgacgcattgctttccgcggccggtcttggtgatatcggcaccttgttcggtgtcggctcgcagtccgatggcgcgggcaagcatggcgccgaaatgttgcggaccacggtcgattatctgaacgaacgtggtatgaagccagtgagtgccagcgtggtcgtgatcgccaatcggccgaaaatcggaaaacacagggaagaagccgaacgagcgttgtctgaagccataggttgtgaggtgtccatgaccgccaccacaacggatggcatgggattcactggttcgggcgaaggcgtcgccgcgattgccgatgctttggtggaacctgttgatccatcgactcgtcaggcagtctgatttcgcccgctgacggctttccgatacttctttctgctactttcttttgaaggattcaatagccttcgcaaccgcccaaaacaacgtcgaaattgtcacgatgatgaagctcgggggagcggggaacatggcggaaatcacgagccctccccaaatcgaaatcaggcagatcaccgtggcgacgaccatcgccttgaatggtgagcgggcgatgatgttggcggtggcggcgggggtgatcgccaacgcgaagatcagcaatgtgccgactgcgggaacggcaatggtaatgacgccggccataattgtcataaagcaaatgttcatgaaaccgacgggcacgccttttgcctgtgccacctgctcgtcaagcgaactgaacaatagcgggcggtagatcactgccagaacagccaaaagcagcacgtcgaaaatcgcgaaaccaatgatctgaccgtcggtgatcgtcagaatcgagccgaacagaatcgactgcatctgctgcgaagccgagcttgacatgcgtgcgaaaaagagaccaaggccggtggcgaaagcgagtacggttccagtggcgatctcacgctgtgaagccttcttgccaagcgcgccgatcaccagtgctccgccgagagcgaacacgccaagacctgcggaaacaggcaggccgagcaatacggctccggtggcacctggcagtccgatatgtgccaaggcgtgggctgcgaatgtggaatgtctggcgatggtgaaataacccatcacgccggctgccaatgcgatgcacaggccggcgagaaacgcgttcgtcatgaatggggcgttgagcgtggaaacccaatccgggtcgaaagcgaatacggtaccgtccatgctcagtcctcctgcgtggtgtggctgtgatggtgaaattgcgcgatttcttctggagcatgcgcatcgatgctcatgttttcagactcgtcctcgcttggcgtcacgaacatatctccttgcggagtggtgaccacctgtacggtcgtgccatataaatgcgtgagtagatgggaatccagcacctcgttcatgcctgcatagtgtggatgtccgtcaagcagatagacggctccagtgaggatgggcagaagcatattaaggtcgtgcgccaccacttggatggtcatgccgagttcgcggttgagtttggcgagtacgtgcacagtggcgcgttgactcgccagatcaaggttggcgagaggctcgtccagcatcagcagtttcgggtcatccacgagcgcctgcgcgatggcgaccctttggcgcagtccgcccgaaagttcggataggcgataattcgctttgtcttgtaactcgacgaagtccatggccttgcgggctttctcgcgaagtgttttggtgacgggatgaatgccgaatcgagttcccgtcaagccgagaagcaccgactgttccgcggtgatgttcgattcgatgtcggatgcgtagctttgcggcacgtagccgatgcgccggtttgcggagcctgcaggctgtccgagtaccttgatgctgccgtgcgcggttggaatcaatcccagctcggccttcatcatggtggttttgcccgcgccgttggtaccgacgattgcggttaccgagccttgcggaatgctgaacgtgccgtgttgccagatgacgtgaccgcctcgtttgacgcaggcgtcgtcgaattcaatgcaggcaggtgtctcgtcgtgcatggcttctccttgatttgaatgcacgtacatactcgcaaatagtgttgacaatcattctcaataaggattgtcgttgaaaccgtcgtaacgatcagacgagaggctttgcgtaaaaagcaaaacgtcaggcaaacaaaaaagaccatcccgcattcagttggacgcaggatggtcttggcaaaagcgattaccgatcgattgttcggcaatcgcttttgccgaacaatcatttcaccggatttggttgcggcgcatcgttcgatccgttcgttgtctgatcgttgtcttgcgtcgaggaatctgcggttgattccaaggaatccgcgttttccgacgtgctgtcggaacttgttgcatcctgatcgtcagcatcgaattgttcatcgaacatatcggtcaacgacaggataagagcgcggatccacgatgtcaggctggtgtaatcggagggcatctgttcgctgatatcaagcacgggaacgtcggatttgtaagcaatgccggtcagcgtgttcgtggcgtcgcttgtggattgtgtgtcgttgatcagcacctcgactttatgcttttccagcaattcctgaaattcctgaagatcggtgggggttggctcggaattcgtgctggacgattgcagatacccctccggcgtgttgtcggtgaaccccatgtcgctgagcagatagtaggccaccggttcggtggcggcgtaggagacgttcttatgcgagtcgctgaacgccttcatgtccttttctattttcttctcccgcctgttccacgcggtgagtttgttgttgaaatatttcttttgcgcgggcatgatgcggctatatgtgtcggccaattccttggccatggcgtttcgggcgtcactggagaaccataaatgcggattgtctccctcgacggcgcccaccatttgtgctgcggaaacggaaaccatggtcttactgaggttcttggtggcccaagtgtcatagccggcaccattggacactacgacctgtgcctgctgaagtttgtcgatatcgtcggttttcggctcgaaatcatgcgcattgacatcggttgaagagagaaccgacgtgaccttcacatggacgccaccgatctgctcggcaagagaaccccattgattgaccgaggcgaccacttcgattggagtgatctgttcggttggggtttcggagtcggcggaggcgtcattctcctgcgaagttgaccctccggaacatgctgccgtgccgaacgccacgcaaagcgcgattcccgcagcgaaagcgcgtaacaaagaacgtttgtgcaagcgcatgtcgattgccctcttcctgaaccgccctaatcgtgttcatctcataaatacgtgtgcgacttacgactgaaaccaagatagcctacgatacatgcaaatgccaatacaacaatgagacaacgaaaaggggagtggccggcatggcggtgaaaatcgatggaaagatggtgtccgcgcagatcaaagcgaatctcgccgagcgagtcgcagcgctgaaagagcagggggttaaccccggtcttggaactatcctggttggttccgatgccggatccgtcaaatatgttgccggaaagcatgccgattgcgctgaaatcggtgtgaactccattaagaaggagttgcctgccgacgcaacattcgaacaaatcgccgaagtcgtacaggagcttaacgccgatcctgcctgcaccggctacatcgtgcagttgccgttgccgaagggcatcgacgagaacgccatcatcgatctgatcgaccccaagaaagacgccgatggtatgcacccatataatcttggcgaactcgtgttgcatgcgcgcggcgagatcactactccgctgccatgcactccgcgaggcgtgatcgaactgctcaaagcctacgacattgacctggacggcaaagaggtctgcgtgctcggccgaggcatcaccatcggccgcactattggtctcatgctgactcgcaaggcggtgaatgccacggtcacgctgtgccataccggcaccaaggacgtgcgcaagcatatgcgtgaggccgatatcatcgttgcggccatgggctccgccggtttcgtcaagccggaagatatcaaggaaggcgcggtgttggtcgatgtcggtgtttctcgcgtgttcgacgagggggtcggccgttatcgcgtgaagggcgatgtcgataaagcctgttatgagaaggccttggcatacacgccgaatccaggcggtgtaggccctatgacccgcgccatgctgctggaaaacgtggtcgagatggccgagcgtcagctgtaattgcgctctgtgtgtgaaaatatgaagtaatttcgggcgtgtcgcgggttgcggcacgccttttttgtgcatggtcccatgtaaacttatgccttgcgtgtgttatatcgcacgcacataattgaagaccgattttatccacccactatttgtaagaaaccaaattaatggcagagaacaataacgaagtcgccaaggtcgccatcaacgacatcggcaccgaagaggacttcatcaaggcagtcgattccaccatcaagaacttcgatgatggtgatctggtcgaaggtaccgtcgtcaaggtcgatcacgacgaggtcctgctcgacatcggctacaagactgagggtgtcatcccctcccgtgagctttccatcaagaaggacgttgatccggacgaagtcgtcgaggtcggcgacaccattgaggcccttgtcgtcactaaggaagacaaggaaggccgtctgattctgtccaagaagcgtgcacagtacgagcgcgcttggggagacatcgagaagatcaaggaagccgatggcgttgtcgaaggcaccgtcatcgaagctgtcaagggtggcctcatcgtcgacatcggtctgcgcggcttcctgccggcatccttggtcgaaatgcgtcgcgtccgcgacctgtccccgtacattggccagaccatcaaggccaagatcctcgagctcgacaagaaccgcaacaatgtggtgctctcccgtcgtcagtacctcgaagagacccagtccgaagtgcgcgaaaccttcctgtcccagctcaagaagggccagattcgcgaaggcgtcgtgtcctccatcgtcaacttcggtgcattcgttgatctgggcggcgttgacggcctgatccacgtttccgagctgtcttggaagcacatcgaccacccgtccgaggttgtcaaggtcggcgacaaggttaccgtcgaggtgctcgacgttgacctcgatcgtgagcgcatctccctgtctctcaaggctacccaggaagatccgtggcagcgcttcgctcgcacccacgttcctggccagatcgtcaagggcaaggtcaccaagatcgtccagttcggtgtcttcatctccgtcgaagacggcatcgaaggcctcgtgcacatctccgagctggccaaccgccacgtggagaacccggagaccgtcgtcaagccgggcgaagaagtcttcgtcaaggtgattgacgttgatctcgatcgtcgccgcatctccctgtccctcaagcaggccaacgactccgtcgatccggcttccgaggacttcgatccggctctgtacggcatgccggcagagtacgacgagcagggcaactacaagtatccggaaggcttcgacccggcaaccaacgagtggatcgctggttacgagaagcagcgtgaggagtgggagtcccagtacgccaccgctcacgatctgtgggagcagcataaggaatttgtggccaaggagctcgagaacgctgaagcttccgccgctgaagatggccaggctccgaaggaagagaaggtcgaagaggtgtcttccaactactcctccgagaacacttccgccggcaccctcgccgactccgaccagctcgccgctctgcgcgaccagctgctcggcaagtgattgtatcctgagttaggatccaatccagctcaggctagattttagaaaagaccccgttcctgattcaggttcggggtcttttcgtatgtgcatggcaagcgcgcatgcgaagcgcattacaatggcggttgtggtgattcgaataggattgaccggcggcatagcagctggcaaaagcacggtatccgcaagactgcgtgagcttggtgcagtacttgtcgattatgatctgcttgcgcgtcaagtggtggaaccaggcagcatcggccttcagcgtatagtggaatgtttcggctccgatgctttgaccgatcgaggcgagctcaatcgagcgtggatggcagagcatgtgttttccggcgctgatgcggaacgaaaacgcaagatgctggacgaaatcgagcatccactgatttatgaacttgcagtgcagctcgaacatgaggctgttgaagttgattgccaagcagtagtggtgcatgacataccgttactcgccgaagtaattgacagcattccttttgaattcgaccatatcgtaactgttgaagcgcctgaacaggtgagggtcagcagaatgatgtcaacgcgaggcatgagcgaaagccaggcatggaatcgtgtgaaccatcaatccagcgtggaacagcgtcttgccattgccgatgagatcatcgattccacacagtcattggaacaaatgttcgagcatattgatatgctaatgcaacaatggcgcacggaagcgaggtaggtatgggattcaatattgaacgcacgaacaagccgtttgtggtcaaatcgccatataagccgagcggcgaccagcccaaggcgattgaagagcttgcggaacgcattgaaaacggtgagaacgatgtggtgctcatgggcgccaccggaactggcaaaactgccaccacggcatggcttattgaacgtctgcaacgcccgacgttgatcatcgaaccgaataaaacgttggcagcgcagctgtgcgccgagttccgtgaactcatgccagacaatgcggtgagctatttcgtttcgtactacgactactaccagccggaagcctatattccgcaaaccgatacgtatatcgaaaaggattccaacatcaatgacgacgtggaacggcttcgccatgcggccacggcgaacctgctgacgcgtcgtgattgcgtggtcgtggcaacggtttcctgtatttacggccttggtacgccggaagaatatgccgggcgtatgctgtttctcgaggaaggccagcagatcgaccgtgacgacttgctgcgcactttcgtcgccatgcagtacaagcgcaacgatatcgccttcaccagaggtactttccgtgtgcgcggcgataccgtcgaaatcattcccgtatatgaggaactggccatccgtattgaattcttcggtgatgaaatcgaccgtatttcaaccctgcatccacttaccggagatgtgatcgggcgtcaatcgcaagtccatattttccccgcatcgcactatgtggcagggccgcaacgtatggagcgagcgttgtctaccattcagcaggaacttgatcaacgtaccgctgaactacgcaaacaaggcaaggaacttgaggcgcagcgtcttaccatgcgtaccacatacgatttggagatgctttcccaggtcggcgtatgttccggagtggaaaactactcaagacatttcgatggccgtgagccgggcacgccgccgcatacgttattggatttcttccctgacgatttcctactcgtcattgacgaatcgcatgttaccgtgccgcagatcggcgccatgtacgaaggcgatgccagtcgcaaacgcacgttggtcgaacatggcttccgtctgccttcggcgatggacaaccgaccgctcaaatggccggaattccttgagcgcgtcggccagacggtctacctttccgccactcctggcgattatgagcttggcttgagtgacggtgtggtcgaacagattattcgaccgacaggattggtcgatccgcaaatcgatgtgcgcccggttgacgggcagatcgatgatctgcttgctgaaatcaaggaccgtgtgaatagaaacgagcgtgcgctcgtcaccacgctcactaagaagatggctgaggatctgacggattatcttctggagcgtggcatcaaagtcgaatacctgcactccgatgtggacaccctgcgacgtgtcgaattgctgcgcgaactgcgcgaaggcaaaatcgacgtcatcgtcggcatcaacctattgcgtgagggtcttgatttgccggaagtatcgttggttgcgatccttgacgcggacaaggaaggtttcctgcgttcctatcgttccctcatccagacgattggtcgtgccgcgagaaatgtgtccggaaccgtcatcatgtatgccgatgacattaccgatgccatgcataaagccattgatgaaaccaatcgtcgccgcgacatccaaatcgcatataacaaagagcatggcatcgatccgaagccgttaatcaagaaaatcagcgacgtcaacgacatgctcgccaaggaagatgtcgatacgcagacgttgctcggtaccggctaccgtaatgaaggcaaagccggcaactcgcatcttggcgtgcctgctaccagcaaggaggaatctgacagacggcatgaggagattctcaaggccggattgcccgcgcaggatctagctgatctcattcgacaactgtccgagcagatgcatgccgccgccgaacaactgcaattcgagcttgcggctcgtttgcgtgacgagatccgcgacctgaaaaaggaacttcggcagatgacggaggcgagcaaatagttccgaccggtcatacggcatccgtaccatagtggattatggctgaaacaccacttgtttttgaaatcgccacgttcgcggtgcttgccgtcttcttcgtggttgacttgtttatcatcggacgtaagccccatgtgccctccaccaaggaatgcgtgcagcatatcgcgttctttgtagtcatggcgttgatcttcggcggacttatgtggttcttcgcaggttcgaagccggccatcgaattttattcgggctggcttacggaatattcgctgagtattgacaatctattcgtcttcgtcatcattatgtcgaattttgcggtgccaaaacagctgcagaaattcgtgctgtccatcggcatcacgatcgcattggtgttgcgcggcgtgttcatcctcatcggcgcggccattatctcccgcttcacctgggtgttcttcctgttcggcgcatttcttatcgtcaccgccatcaagttggtcactgggggagacgaagatgaggaatatcatgagaatggcttgattcgtgcattgcgcaaggtgatcaagatcaccgatgagtatgacggagaaaagttgcgtaccgtcaaaaacggtgccaagtattggactccgatgctgatcgtctttctgaccatcggcaccaccgatgtgatgtttgcctttgactccattcctgcgattttcggtttgacgaaggatccgttcattgtgttcacgtccaatgtgttcgcattgctcggcttgcagcagctgtacttcctgcttggcgagctgctcgacaagctggtgtatctgcctcttggactttccgtggtgctgggcttcattggagtcaagctcattatggaggcattgcacggcaattcgttgccgttcatcaatggcggtcaaccgatcgcttgggtgcctgaagtgcctacatggctgtctttggcggtgatcgttgtggcgattggtggtgccgcattggccagcgtactgaagatgcgtgccatcgaagcaaaggaaaagtgacgatttgagaaaccgcatggaaacatgcggtttctttttatcaaaaaaatgtgagcgctcacaacacgcctcgtttcagggtggaagtgagcgctttttgctagtagactggtcggttggaaacagggtcgtcagatccaaaatcaatatcaacaagaataggcaggcattcatgcgtaaagccaagatcgtagataccatcggtccagctaccgagtccctggaaggcatcaccagccttgtcgaagcaggtatggacgtcgctcgtctgaaccgctcccacggcactccggaagaccacctcaaggtctacaacaacctccgcgccgccgccaaggccaccggccgcaacgtcgcagccctggttgatctgcagggtccgaagatccgttgcggttggttcaagaagaacgccgacggtgaagacaaggtccagctgaccgaaggccaggagttcgtcatcaccaccgacgacatcgagggcgacgagcatatcacttccaccacgttcaagggcctgccgggcgattgccatgctggcgatccgattctcatcgatgacggcaaggttcgtcttgaggtcaccaaggtcgaaggcaacaacgtgtacaccaaggtcgtcgttgccgggccggtttccagccacaagggcatcaacttgccgggcgttgccgtgtctctgccggctttgaccgagaaggatgaagccgatctgcgttgggctatccgcactggcgccgacatcatcgccatgtccttcgtgcgtttcgccaccgacatcgaccgcgcccacgagatcatggacgaggaaggccgtcgcatcccggtcgtcgcaaagatcgagaagccgcaggctcttgagaaccttgaagagatcgtcaaggccttcgacggtatcatggttgctcgtggcgacatggccgttgagtgcccgctcgaagaggtgccgctggctaccaagcgctgcatcgagctcgctcgccagtacgccaagccggtcatcgtggccaccgaagtgctcggctccatggtcaactccccggtcccgacccgtgcagaggcatccgactgcgccaacgccatccttgacggcgccgacgctaccatgacctccaatgagaccgccgtcggcaagtacccggcagtcaccgtgagcaccatgagccgtatctcctccttcgccaccgagcacggtttcgaccgtatcccggagctgaagaacctggatatgtcttccaccggcgccgtgtcttccgcagctgtggatctggctgacaagctgaacgccaaggccatcgttgcctacacccagaccggttccaccgtgcaccgcgtgtcccgcgaacgcccggccaccccgatctacggcatcaccaacaacgagcacacctatcactggctggctctgtcttggggtaccgagtccttcctgctcgatgaggattaccacgacaagtcccgcaaggacctgatgatcttcaccgataagatcctgaaggatgctggcaaggtcaccgatggcgacaagatcgttgtgctgagctccgcccagggcgagcaccagccgggccgcaccgattccatctacgtccacaccgttggagcttgcgactgagatgtgtttcggtcagtgactggctgattagcgaataggagggcttccgtccgtttggatggaagccctcttattgttttcggatgatgttgatttgttgccgatttacagattgcgataggttgcgatcaaagtgttgcacatggtgcgaaacgccgaccgctcaaggactttgcgaaatcatttttctgtgttaagataatcaagttgtgcgaaagcccctgtatcccaattggtagaggagacagcctcaaaatctgtacagtgtgggttcgagtcccaccgggggcaccggattaatgaacagccgcggacgggtatcacccgccgcggcgtttctttttgaaacccatctgacgcatgtgcagttacgtggtagctcagtgtcttgccatccaccagattgtagattatctccacgtttccgccttttcgcgcacctcgtcgagcgcatcaagggtctcagccggaatgggttgcctcgacaggctgagcggaatacggttctccctgacgatctgccggtagaacgcgcgggtcacgctggacaggtcaagtccaagatcctccacgatgtccgtagcctgttttttcgtggcgtcgtccacgcggaccgtcaccgaagtcatggtcatctcgacctccatcttttgctgattgttgtaagacgattatagctcaatgtcttacgtttggtatggagagtctgcacatcctgttttttcggttgacgggatgcggattgggactggaccgtgacttgaacgcgatcatccgcatcggggtcgccgggagtgccctggagactctaaacgcgcatggaggagatggaagatggaccggttcggaccgggcaacgtaggctcccgtgaagtgtgaaccaagttgctgcgcgagcgacgtgaggcttggagttggcgtccgcaagaacgccatgcaaactaaaacaaactagtttgtatggcgtcatcaccctcgccggtggtctgaagggccagaacggtccgaccacccagtccgacgtgcggcagatcatcgacctgctcatcccatccgccataatccgtgggcgtcacgctaatacggtactgggtggcttggccgctgtcttcgatgacttggatgatcttgcccttgaagtgcaccacagcatctttatgacgcctagtctctctcgaatggtgtacccaatgttccacctttaaagggtggtaatttgtgcgtgttgcggtgcatgggaagccaaataggacgaaagaaaaaccaaagagcgatgtcttgctccattgataaaagctaataaattatcctgataacagtttaaacgtcatataaattatgtcgataagtccaagcgtgtggcgcattttcttttcgggttaagtagatgatcgtgcaagcatgaaagatgtgcgcgcgaaacaactctacaacccgagggggtgcgtgatggcaagattcaacacacagctggtccacggtgaaccggtgaacgacaatgacaccagagccgtgaatccgccgatctataaatcgtccacttttgcatttgagtcggtcgatgccatgccccgttgggattacgcacgtagcggaaatccaacgcgcgaatacctcgaaaggcagatcgcgcagctcgaacatagtactaggggatttgccttcgcctccggtctggcggcgatccatgcggtgctgtccattttccagcctggagaccgcatcgttgccggagacaatgtctatggcggttcgtattcgcagctgaacgagcatttcaaccgctggggtctggaggtcacgtcagccgacacccgcgttctggaagatgtagagcgtgctgtggcaggggatccgaaacggggaatccagccagccaaggcggtgtattttgaaacggtcacgaatccgctgttgaaggtgaacgacgtccacgcgatcgctgaaatcgcccatcgatacggaacgatcgttatcgtggacaatacattcgtgacaccttatctgcagaatccccttgatctgggagctgatatcgtgctgcattccgccacgaaatatctcgcgggccattccgatgtcatcgctggcctagtcgtggtgaaggatgagcagatcgggcagcgtgtctacttcgcccagaaccgtctcggtggtgtcctcgcacccgttgaatgcgattccgtgcgtaagggcatccaaacattggctcttcgcttggaacgacagcaggagaatgccgccgatgtggcgaaatacctgcttgcccacccgttggtgaagaaggtctattatccgggtcttaccgatggcgaggacctggcggccaagggactgcgcggcgctggcggcgtattgagctttgaggtcgtcgacggaatcgatcccgttgatgtgctcgacaatcttcgactgttccgccttgcggtttcactgggcgccgtcgaaagcctggcggagcttccgtgccgtatgacccacttcgaacttccccgtgaggagaggctgagggtaggcattacggatgagttgattcgtctcgccatcggcattgaagatgtcgccgatctcaaagaggatctgggccaggcgttcgagaaggcctcggagaaacactccgacaagtggaacgatgcgatcacagaagatgcattggcctgaccgtcacgattggatgaactggggaggcgaatatgatacgaattcgtggagttcgaaagtcgttcgaatcgcaattagtgcttgacggcgtcgacctggacattccggaacgtagcgttgtctcgattatcggtccaagcggatccgggaaatccactttgctgagaacgattgactttcttgagaccgccaacgctggcaccatcgacttcggagaaggcccggtgtccctcaccagcaccaagccaaaggatatcgcttcggtccgcgcgaaaatcggttttgtgttccagaattacaatctgtttttgaacagaacggtttgggacaatgtggccatcggcctgatccacgccaagggaaaaggcaggaaagaagccgtacgaatcgcatatgacgaactcgaccgggtgggcatggccggattcgcggaccgatatccgagcaaactgtccggtggtcagcagcaacgcgtggccattgcgcgcgcgatcgccatggatccagaactgttggtgttggatgagccgacatcggctctcgatccggaaatggtggacggcgtgctcgccgttatcaaatccttggcggattccggaacgaccatgctgatggtcacccacgaaatgcgtttcgcccgcaacgcctccgaccaagtcgtgttcttcgaaggaggcaacatcgtggaacaggggaagccggaacacatcttcagccatccaaacgagccacgaaccacacgttttctgtcatcgatacacgatgtcaacgtgctggacgattggaaaccggaagaactcgtgacaattcagcagacgcactccaaatccccaacgtctgaattcagtaattgataatcaacaaaccctccaaaacgttaagaaagaacaggaagaaaatgtctgataccaaatctgtctggaagaaatatgctgccgccgcgcttgctgtcgtttcggtcgttggatttgcctcatgcggatcctcgaacggtgcgggatccgatgattccgccaccagcgagcttgagcaggtcaagaagaacggtgagatcgtgttcggcacggaaggcacgtatgcaccgttctcgtaccacgacaccgacgataatctgaccggctacgatgtggaggtcgccaccgcagtcgctgaagagcttggtgtcaaggccaagttcgtggaaacgaactgggattcgctactcgcgggcgtagacgcgaagaagttcgacacggttgccgaccaggtgactccgaacgatgggcgcaagcagaaatacgatttcaccgacctgtacacctactcacagggtgtcgcggtgacgaagaagggtaatgacgacatcaagagcttctctgacattaaaggcaagaacgcagcggaaactaagaccagcaactggaatcagacagcccaggagaatggggcaaacattgtttccgtcaatgatttcgcgcaggcggttgatgctatcacttccggtcgtgccgatgtcacgttgaacgacaagcttgctgtgctggactatctcaagcagaagccggatgcggatgtgcagattgcggcgaagtccgaaatcagtcctgcggcggccttcccgattcgcaagggtgaggacgacttggtgaaggcgctgaacgatgccctcgcgaagctgcaggaggatggcacattgaagaaactgtctgtcaagtactttggagaggacgtttcggtaaagcagtagaaagatgggtttgcctgttctcaacggatttgcataatgcgtgcggatccgacgaaagcgggccggatatgaggatcgcgcatcatggatgacagactgttgggaatcatcatcggttccttcacgaaattgctgattcctgggctgacggtaaccatcccgctgacactgatatcgttcgcaataggtctggtgttggccatcgccgtggcacttgttcgagtagccaaggttcctatggtgcatcgaatcgcgcaattctatgtgtgggtgttccgagggactcctctgctggtacaactgttcgttattttctttggtctgccgtccgtgggcattgtcgtgccggcgtttccctcggcacttatcgctttctccctgaatgtcggcgcgtacgcttctgagacacttcgcggagctattctcgcggtgccaaaggggcaggtcgaagccggcctgaccacgaacctcagctatctgaccattatgaggctgatcgtgctgccccaagctttccggtcggcgttccctgcattgttcaatacgttcatctctttggtgaaagacacttcactggccgcgaacatcaccgtggccgagatgttcatggccgcgcagcgtatcgtcgccaccacctatgaaccactggtgctttattgcgaggtcggcgtgatatatcttgctttctgcacggtattgacatggctccaaggagtgtgcgagaagcagcttgccaaacggttctgaaaaaggcatcgagttcagcgccttaacggcaaatcctgtgctccttaaagcaaaaccaataaaaaacgattcgcgtggcattcgcataatgtcgtgaatgccacacaaatcgtttttttggctctgttaactcagggtggacatgagccttcatgttcacaactgtagttgcactgagattacagttgttggaggtgagggtgatgggtctcaccgaggagatccgtagccagttgttcggcatgggcgcattggggcgcagacgggccatcaatgaattgcgatcttctgaggacaagtacgcgcgcagtctcgtcccgtgttggaggatgtggtggctcgcccacgctcgaagcgcggactgtcgaaggagcagatctgcatcatgagcggtgtcttagccagattattatctcttttgctcctcagatcattaacagacctttgacgcttaaggttgttaaggataacaactttaattatggacaatggaaagaactgccggaggaatgtcaaaacaacaaagcggaatcagggacttgctcttgttgatgacttctttggagttcgtgaagaagatctggtaaaccaaacagatttagcgtttgctatagctgacctatgtgggccggggttgggatgtgatgaagatatcgaggcatattgcagcaccgttaaagacgtggatattcttagaaggggctttcgtcctgctcagtcagatgagattaatgtgcttacttatcataaggctaaaggacttgaatttgacatcgttttttgtcttgaagcctatcgttttatcatgcctccatataaaggagtacaaaaagatattgagcaatctcttggcatgcactatgtcggaataacccgtgcaaagaaagcttgctatattgctttggggtctcaacggcacaacaaagatggtttacgagatgctgaaccatcggagtttttaacaaaaaacgaagctcttaaaggactgcgcagagatgtgcactggtgatagatgaagagcctgtgataaacggttccccggttgttgagaggtgaattcgataatcggatgtgcggtgcgttttttatggggctactttcgaaaatatcatgcggcgggcttccagacgagaatcgaggtgtgaggcttgagtttgggaagtagatgagaggaagagataatatgcccgtcggcgtttaagctgcgggcgtttttcttgttctactgaacaaaaataagacagcatgacgtagtctaaaaaacagcagacactcgtgttggttacatccagacgataggttaattgatagactaaaccgaaagatggtttgcgagagaatccatatgtttgtggggtgaacaatggctgtttccaaagtcgaatctcgtacggtctcggagtgttctctgaacaacatcacgtccatggatccactgaacgaggaatggtacgaaaatctgatcatcgatcatctgacggaaagactcggatatgagcacctgtacgggcccgacgtccgacgcaccgacgactcgtatcgcgacgtattccttcctgatattctcccggatgcgttgcgacgaatcaacagaaatctgccggaagcagccgtcgaggaggccattcggaagattcagaatgtcgagatcggcagcttggagcagcgcaacgagatattcaatgactacctgcaatcaggagtcgaagtgcacttctttgacggcaaggaagagcgtgatgacatcgtccggctgcttgatttcgacgatcccgagaacaacgatttccatgtcgtgaaccagtggacgttcgtggagtattccgagaaacgtcccgatgtcatcattttcgtgaatggcatgccgttggtgttgttcgagctgaagtccccgtcgagagaggagacggacgcttcacacgcgtacctgcaattgcgccagtacatgaagcagataccgagcatgttcgtgcccaacgtgttctgcgtgatgagcgatatgacccagaccagggtcggcacgatcacatccgacgaggatcgttacgtgacttggaagtcggttgacggcgactattccggaacgaaggccgcgacatggagcaccatgattgacggcatgctcccaaaggagcgtctgctcgatatcatccagaacttcgtgtgcttcaacgattcctccgagaaagtggtgaagatcatcgccgcgtaccaccagtatttcgcggtaaggaaagccatcgtcagagcggaggaggccgtcaatggggatggcaagattggcgtgttctggcatacccagggaagcggaaaatcgctttcgatggtgttcttcgcgcatctgctgcagcgttatcttgaaagcccgaccatcgtggtcatcaccgaccgcaacgatctcgacgaccagcttttcggacaattcagccgctgcgccaggttcctgcgccagaaggcggtccaggccgagagccgcaggaatcttcaggaactgcttgagggtcgtgaggcgaacggcatcatcttcacgaccatgcagaagttctcggacggcgacgagccgttgtgcgaccggagcaacgttgtggtgatggtggacgaggctcaccgcggccagtacggcctgaccgaacggatcaacgcggacggtcatgtgtcggtcggcgcggcccgtgtcgtgcgcaaggcactgccgaacgcgtcctatatcggtttcaccggaacgccgatctccacggatgaccgcaacacccgcgagatcttcggcgactacatcgacgtgtacgacatgacccagtccgtcgaggacgaatccaccaagccggtctactacgaaagccgtgtggtctcgctccatcttgacgagaacgcgctgggccgcatcgactcggtctacaaggagttcgcggaccaggccgacgaggcgagcgtggagaaatccaagcatgacctcggcggcctcgatgccatcttcgacactcccgaaaccatcgacgcgttgtgccgcgacatcgtggaccattacgagaacaaccgcgccgacgtcctggccggcaaggccctgatcgtggcgtacagccggccgatcgcgatgaagatctactacaggatcatggagctgcgccccgaatggaaggacaaggtcggcgtggtgatgaccatgtcgaaccaggatccggaggaatggttcgacgtgtgcggcggcaccacgcacaagaaggagatggaacgcaggttcaaggacgattccgattccctcaagatcgccatcgtcgtggatatgtggctcactggctttgacgtgcccagcctgtccaccatgtacgtgttcaagccgatgaagggccacaacctcatgcaggccatcgcccgcgtcaaccgcgtgtgcaagggcaaggagggcggtctggtcgtggattacatcggcattgcaggcgcgctcaagcgggcgatgaaggactataccagccgtgaccagcacaattacggcgacatgaacatcgccgagaccgcctatccgaaattcctcgaaaagctcgacgtgtgccgtgatctcatgtacggcttcaattaccacaaactcatcttccagaacagcagggaggcgcttgccgacgccatcgcggagggaaccgactggctgctcgatccggaacggcacgaagacacggaatcgttcctcaagcaatgccagctcatgaaccaggcgctgagcctgtgcaaaagcatggtaagcgaagaggacgcgcatgaggcggcttacctatccgtattgcgcgtgcaggtccttcgcctgaccggacgtggctccggcgggggcagcggcatgacgtacacggagttcaacaagcaggtgagcgagatcctccagcagagcgtgcacgcggacggcgtgctcaacctgttcgagaaggatagcgtggagatctccctgttcgatgagacgttccttcaggaggtcgccggcatgaaggagaagaacatcgcgatagagagcctgaaacgcctcatcaaggagaaggtgcgggcgtacgggcgcaccagcgtggtcaaatcccagaagttcagcgagatgctccagaacacgttgaacgcgtatctcaacggcatgctcactaacgcgcaggtcatcgaagagctcgtcaacatggccaaggagatcatgaaggaccgcgacgacgcgcagaagctcggcttgagcgacgaggagatggcgttctacgacgcaatcacccagccgcaggcggtcaaagacttctacgacaacgaccagctcgtctcgatagcccgcgagctgaccgatgcgatgcggagcaacgccacgatcgactggcagaagaaggaaagcgccagggccggcatgcggcgtgccatcaaacgtttgctgcgcaaatacaagtatccgcccgaaggcgtcgaggacgccatgaagaccgtcatggaacagtgcgagctgtgggccgacaccaagatcagcgaataggacgagcaggaggataatacaagacatggcaaagaagaaggacaataccgccgagatcggcttcgaggaacagatctggagcgctgccgacaagctgcgcggcaacatcgacgcttccgaatacaagaacgtcgtgctcggcctcatcttcctgaagtacatctccgacaagttcgaccagaaataccaggaactcgttgaggagggcgagggcttcgaggaggaccgcgacgaatacgcgagtgagaacatcttcttcgttcccgagagcgcccgctggaagaccatcgcagcggccgcgcacacgcccgagatcggcaaggccatcgacgaggccatgcgccagatcgaggccgagaacaacaagctcaagggcatcctgccgaagaacttcgcacgccaggagctcgacaagcgacgtctgggcgaggtcgtggacctgttcaccaacgtgaagatggccgaaaagggcgatagccgcgacatcctcggacgcacctacgaatactgcctggccaaattcgccgaagcggagggcaagaacgccggcgagttctacacacccgcgtgcgtcgtgaagacgctggtcgaagtcatcgaaccctaccacgggcgagtgtacgatccgtgctgcggcagcggcggcatgttcgtacagtccgcggacttcgtcaaacgccatcagggcaacattaacgacatctccgtgtacggccaggagtccaatccgaccacgtggaaaatggcgaccatgaacctcgcgatccgcggcatcgacgcggatctgggcgatcataatgccgacacgttcttcgaggacctgcacaagaccgagaaattcgatttcatcctcgctaacccgcccttcaacctgaaggactggggagggaagaaacttgaggacgacgtacgctggcagtacggcaccccaccggagggcaacgccaacttcgcgtgggtccagcacatgatccaccacctcaatcgttccggccgcatgggcatggttctggcgaacggcgcgttgtccagccagacgaacaacgagggcgagatccgcgccaagatcgtggatgccgatctggtcgaaggcatcatcgcaatgccggacaagcttttctacagcaccggcatacctgtgagcctgtggatcatcaccaagaacaagaagcagtccggcaagacgttgttcatcgacgcgcgcgatatgggaaccatggtgtcccgcaggctccgcgagtttaccgatgaggacatcgccaaggtatcgactgcgtttgacacgttccgtgacggcactctggaaacggagaagggcttctccgccatcgccacgacggaagatatcaaggcgcaggattacatcctgactccaggccgctacgtcggtgtcgccgaagtggaagaagacgatgagccattcgaggagaagatgacccgtctgaccggcgagatcgccaaatgcttcgaggaatccaaccgtctgcaagagcagatcaagaagaatctggaggccatcggctatggcatgtgaagttgaatggattcctctcggagatattgtcaatctttcttccggaggaacgcctgataaaaaacagccagcatactgggatggtgagatcccttggataagcgcaaaaactttaacaggcgacactgtgacaacaagtaatcttttcatcactgaagaaggactccacgcgggaagcaaacttgctcctgttggttcgatacttttattgacccgcggaagcggcttattcaagagaatccctcttgcaattgtaaacgctcccgttgcttacaaccaagatgtaaaatgcatgacttccaaagtggcaactattaccaatgagtacgttttctttgcattaaaggcactgtccccagagttaacaaatatgctcgagacaaccggaatcggtgcgggtaaattagccactgaccgacttctcgacatgccgattccagttttatctcatgatgagcgagagaaagcagtatctttcttctcggcattgtcccgaaaaattatgatcaacaatcggataaatgattatttgttagctgcgtgaggtcaaccttcgaaacgtcaatttcgccggacatgagtctgggaaggagtgtatctctcaatgactgcaactgtttattctctaagcaatttctgaaaatggcggtaaaatatggctgaatccgcttgcagaaatcttgcacggattcctgttcgggatccggaaactctaattcttcaatgttttgccggttaatcccaggaatggcggctttcgtaccattggtttctagccatttcattacataaggcgtgtgaaagtaatagtacgcaaactcatttaggccacgatctccaaaatctagtttaaaaacatgctcatttatataaaattccttataagggtatccttcaccaaacattgagaaatgggggataaactgtccaggtcgaccgccgtccttgtagatcattaattcatatccatttactcgcccttttttgaggttatcagcaaaagttcttggaatatatttgttgctcgagtaattgaattcgccaagtttcttcacattttctgcgccaacactaggtattccgcaagaagcagctcctcctttcgggcgtttgccggtttcaagtatgtgaggcaagtctgcgatatgtacggtcttgctaagcgttccacgtgtttcaagatcggcaaatctcatctcaccgacctcaagcaaataatcatttagccgattgttaagagttattttgtattgaatggaatctaaaacttgagcaatagaatcttgcatttcacgagatggcagatcaatgtcaagattttcaatcattctcttagtaagggcgttcctcgttgctccggaagaagctaagctaaggagcgtcgtcttcttagattgcaaagaagccagtaaataggtcgggttgatttcttttccggctcgaacgatcgctacatgctgattcactcgagccggtatgcgttccgaaggaactatgcatgctcgagcgacagaatcacctgtaatgttcaataggacgtcattactgcgtacttcaacgttggagagtgactctgcctgttcatcgtctagaaaagcaagaccatcgggctggaaaacccaatcatgaatgttctggctacgaataattgggataccggcatctttgtaagcttctttaccccctcgcggcgttgctccgcttccgatcttctcgcaaacatccccgagtcgtgtcattccaaataccttctgtgtgaagctttcacgttgttctggttgaccatggcgtagtgcatggtcgtgtctattctcgcatgaccgagcagtttttgcacctgttcgatcggcatgcctttatcgatggcatgtgtggccaacgtgcgtcggaatttatgcggatgaacccgattgatgccggcttcctttccgagctgcctaagacggctttcgatgccgccgatgctgatgcggtcaccgtcaccattcaaagcgacaaatagcgccggattgctgtcgttacgcgattgcaggtatgcggtgagatggagtttcgttctggcgtcgaaatagacgggacgctgcttgtttcccttgcccgtgaccaagcattcgcgttcctgaagattcacgtcggctatattcaagccgatcaattctcccactcgcatgcccgtagaggcgagaatgtccacgatggcaagatcccgcaaggtgctgcatctatcccgcagagtttccagattttcgtcgctcaggacctctttggccattacggccgttttcacacgatggatgcgccttacggggcttttgacgatatagtcctcgtcctcaagccacgcgaagaagcttgacatgatgcgtcgaatgttgtcgatggtgaccttgcccgcatgacgctcgttctcgtatctgttgaggtactcgcgtaagtcgtcgctgcttatccgcgtgtaaggcttggcaagggccttggtcatgtgctgaagcgtgctttcatagtaagcgatggttttcggcgagcagccttcgacctcttttgccgtgaggaatagcgtcagcagattctgcggcacggatgtttcctgagctggcagtagcgtgactctgagtacttcggccaaatgtttgagctgtgacggatcgagcatgttctgcatctgtgacagaacattattaatgatggtttccataggcgtcccttccaataacggttaggaacattgtgcccgtgcacccacaaatgattatttgttagctgcgtgaggtcaaccttcgaaacgtcaatttcgccggacatgagtctgggaaggagtgtatctctcaatgactgcaactgtttattctctaagcaatttctgaaaatggcggtaaaatatggctgaatccgcttgcagaaatcttgcacggattcctgttcgggatccggaaactctaattcttcaatgttttgccggttaatcccaggaatggcggctttcgtaccattggtttctagccatttcattacataaggcgtgtgaaagtaatagtacgcaaactcatttaggccacgatctccaaaatctagtttaaaaacatgctcatttatataaaattccttataagggtatccttcaccaaacattgagaaatgggggataaactgtccaggtcgaccgccgtccttgtagatcattaattcatatccatttactcgcccttttttgaggttatcagcaaaagttcttggaatatatttgttgctcgagtaattgaattcgccaagtttcttcacattttctgcgccaacactaggtattccgcaagaagcagctcctcctttcgggcgtttgccggtttcaagtatgtgaggcaagtctgcgatatgtacggtcttgctaagcgttccacgtgtttcaagatcggcaaatctcatctcaccgacctcaagcaaataatcatttatcaggctgtgggtctttttgtagcgtttgttgtccgtccggattggcctctgaatttcatgagtggttccgtgaacattttttctttggttacggtcacctatgcaaagcagatttgggatgagatgatctgccctaaagataccaaggaagaagaatccttgcaggctagttgtgactgtaatcgaggtgaggagcaagaactgatgaggccggattttcgaagaggtgaattaaatgagggacaggtcgaaatgaaagtggacgatgatgcgcattcaatcgtgcctgagtcaacgtcagcgtatgtccaaaagaactccgtaacgacatctgggccatcggacattttattgcaacaattgttgcggttggtaactgttcagggctgtttattggcgttatgtactttgcgtcgatattcatcgagcccggacgatcgacatgacgccgattagcgtagtccaggaaagattgtcgatgaataaactgctggttcgatggacattggaaaccatattcgatgttcatcgaaccggcagtttctatttactttcagtgctgtaccgacagtgtttgctgcaaggtatgtgagtcgtgtggaggcacgacgaccgcgcaatcgcgattgttgaccgcttccacgcagacgaagccgcgccattcgccctcatccaaatcgccgatggcgtttccggcttgttctcccggattccataccacggtctgcgctgcgccctgcttggcgacaatgatggtgcgctgcaacacggggtcgcgcagctcaagcgtatccgccgaatagtagatgcggtcaaccatgccttggaaggtcacaggttcatcaccttggctgcaacgtggatcgccgtccaatacggtatcgagatagtccgcgccctccagcccgcatacctgcgactgttcggcgtcgccaacctgcagatacgtatgcagtgcctcttcgtaagacaatggctcgtctccatcgttatatacggtaagcgacatcgtcaactcacagccgacttcaatggtgtaaacggcatgaaattgaggattcggtccagaaacaaactgggaaagtatatctgcgttgatctcgctggaatccaatgtatagcgcaacaaggcatcggaagaaccttccttgtcataatgccagaagctattgcgggcaaaaccatgcttgggcttcttcgaagccacatgcccgccttcgaaaccggaattgaaccaagggaaaataatcggaacaccgccgcggatggcagttccttccttaagatgaatcgcctttggccgccaaaccacagcctgttcgccggcaggtgcccaggaaagcacatgcgcaccgtaatcgctgactgatgccgttgcgtcttcgttgacaatatctctgatagtgaaagtgctactcatacgaccagtataaacaagacgacgttgaagcgggattgtggaaagaaggactttgcaggattgcggaatttctaggatttttcggctttgcacgtgaaggaaaaagaggattgcggcaacacgcgcttgtaggcttctgctagtatcatccatgaaagtacaaggaagatagccggttcgttccaacttgcgtgatggagggtgaatcaaggctgtgaaaagctgaagatttccagaatccgaacgattgcaagtaacggcatcgaatcagtccaggaccaggttggggtttgtgagaccggctttgggtgtgacagtggaaagagaccgacatgtctgcagaaaagaccacggaaccggacgaagtgctcaccgacgatgaacttcaggctgccgcagcgcctgagcagtccatcgaggaagatgacaaacctcgcaagcgtaccgtcgtcgtggccgaagacgaatccgtgaaccgtatggatttggttgccatgctggaagatagtggctacgaggttgtgggcgaagccgctaacggtgaggaagcagtcgaattgacccgcaagttccgtccaagcgtggtatgcatggacgtcaagatgcctcgtatggatggcatcgaagcggcgggcatcatctgtgatgagaatatcgctccggtcgttatgcttacggcattctcccagtccgatctggtcaagaaggccacgggtgcaggtgccatggcatacgtcaccaagccgtatgaggaatccaagctgcttccggctctggaagtggccatgggccgtttcgccgaaatcaacgatctgctcgacaatgtggagcgcagcgaatccaagctgcacgaaaccgaagagcagctgaagaaggcggaagagcagctgaagaaggctgaggaaaccctcgaggaacgtaagcttgtcgaccgtgccaagggcctgctgatggataaggctgacttctccgagcagggcgcgttccgttggattcagaagacctccatggaccagcgcatcccgaagaagcgtctggctatggccatcatcgccaagtacggtgatcagaagtcggaagcagaggatgagcgctaacacagcaactgtggaaggcactacgcgcgggacgctattggtcgttgacggccattccttggcgttccgcgctttttttgccttgcccgtagagaatttcagtacatccgcaggtcaggcgaccaacgccgtatggggcttcgccaccatgctttcgcaggtgatcgacgcggaacatccggatcatcttgccgtcgctttcgatgtcaaaggcggtaccttccgcaatacgatgctgccgcagtacaaaggcacgcgagatgcggctccggaagatctattgacccagctgccgttgattcaacggatgctgacggcccttggcgtcacgttcatcgaaaaacctggatacgagggcgatgatgtgattggcacgttggcgagcatgggagacaaagcaggctatcgcacgctggtgctatccggcgatcgtgacgcgttccagctcatcaacgacaacatcaccgtgttgtatccggggcatcatttcaaagatttgaagcacatgactcccgacgcggtggtggagaaataccacgtcacgccggagcaatatccggatcttgccgcgcttcgtggcgaaaccgccgacaacattcccggcgttcccggcgtgggcgatggattcgcggccaaatggatcaacctgtatggcggacttgaccagattatcgagcatgccgacgaaatcggcggcaaaaaaggcgaggcgttgcgggccaatatcgatcaggtcaaactgaatcgttccgtgaatgccttggtgcgtgaccttgaccttggcgtgtccatcgaggatttgactttcggtcaggtggacgccaaccagctcaaccaactgttcaccagacttgaattcggcatacgcaccaaaaaccgtgtgctgagaacattcaatgcggggaagcccaccaacgatcccgtgcagcaagacgagtccggcaagctcgaaatacctcagtatgaaacggttgactcgccggaagcattggaagcatgggtacgagacaatctgcctatgccgaacgggcatctgcatgacgaacgtgaaatcgcgccgaagacgactccctccggcttcgccattgatcatacgaagcagtgtgcgcagtccgtggcgcattcgtgggtgttgcaggtggaaggcgaaagcaagccagggaacgcggcttattcgtcgctgatgatcgcatcgcaaggcaaagcgattcgcatcaatcatattgatcgcgatatggcgtcacaactgcaaacggtacttgacgaacaccaccaatccatggtggtgcatgggtataaggaacagtcccacctgctggaaagcgtcggtgtggcgttgccgaagccgctgttcgacaccaagcttgccgggtatctggtccatcccgatttccatgccgacacgctggaacgggcggcggcgcatttccttgacctgcatatcgaggaacagtccgagggcgcgacgcaaggcacgcttgatttcgacgagccggacgatagtgcgcagcggaatgacaaccagcttccgcgccatactgcgattgttggtttgctggcgcgtaaactggcggattcattggatcagcgtgagcagttctcattgcttgaatctgtggagattccagtatcccgtgtgctgtatggcatggagcatgccggtgcgcaagtcgatatgaacaggctgatgagcatgcgtgaacagcttgccgccgacgcgaattacgcgcaggaaacggcatggcagtatgcgggcgagcgcgtgaatctgcaaagtcctaagcagttgcagaagattctgtttgaggatatgggtttgaagcctacgaagaagactaagactggttcgtatactacgaatgcggctgctttgcaggtgttgcgtgatcgttcgtatggtaatgatagggcttgtcagtttcttgatgcgttgttgttgcatcgtgagaagaataagcttaagcagattgtgcagacgttgattgatgcgacgaacaggtctgatggtcgtattcatacgacgtttgagcagactgtggctgcgactggtcggttgagttcggttgatccgaatttgcagaatattccgaatcgtgatcctgctggtcgtgagattcgttcggcttttgtgcccggtgagggttttgagtcgttgttgagttcggattattctcaggttgagttgcgtattatggctgatctttctggtgatgaggcgttgattgaggcgttccgttccggtagggattttcataagtatgtggcgagtttggtgtatggcgttcctgtggatgagattacgtctgatcagcgcagtcatgttaaggcgatgagctatggcttggcatatgggctgagcacgtatgggctttcgcagcagcttggcattaagccgggtgaggccgagtcattgaagcggcagtattttgcgacgttcggcaaggtccatgagtatttggagtcgttggtttcttcggctcgtgaaaagggatatacggagacgatttatggtcgtcgtaggtattttccgggcttgaagtcgccgaatcgtgcggtgcgtgatgctgcggagcgtgccgcgttgaatgcgcctattcagggttctgctgcggatattatgaagatcgctatgattcgtgctgatgatgcgttgcatgaggctggtcttgccagtcggattattttgcagattcatgatgaacttgtggtggaggttgcgccgggtgaggcggagcgtgtcactgcgttggtgaaggatgccatggagcatgcggtcgatatggcggttccgttggatgtttccacgggtattggttcggattggcagcttgccgcgcactgatacggtactgggtttcgtgtgtgttgcggatgtgcgtggtcgagcaatggcataaggaggaatgatggcaacgctgaagcaggttgtggatgtgctggaaacgttgtatccgcttcgctatgcggagcagtgggatgagcctggtcttatcgtgggtgatttgcgtcagcctgtgcgcggtatcgcttttgcggctgatccctctatggcggtggttgatcaggcgattgccggtggtgttgatttgctggtttgccatcatccgttgttcttccgttccgttcatgcggtgtcgggattgggtttccgtggtgagattgtgcgtaagctcaatcttgccggatgtgcgttgtgggtggggcatacgaatgccgatgcggcgtatcgtggcgtcggcatggctgcggctgacatgttcggtttggtggatcagcgtccgctggtgcccatcgatgatccggatgccgagcatccggtcggtttggggcgtgtggggcgtcttgccgaacctgtggcgttgcgtgatttcgccagtcgagtagctggcgcgctgccgtacaccgagcttggcgtgcaggtttgcggcgatctggacgttccggtcagcacggtggcggtgcttccgggttccggtgattccttgttcgatgaggtgcgtgcggccggtgccgacgtgtatgtgaccagtgatctgcggcatcatccggtgacggacgccatagagcaggcccgctatgaggcttccatgcgtgcttccggcgttgccatgggccatggtgacgggcgtgtgcgtccggcgttcgtcaacactccgcacagcgctatcgaatccatgtggttccagtatgcgatggaagacgttccccatgcggttgcggaagcgaccggcgacattcctgccgtgcgttggatttccatgaataccgatccatggaatatggtatttccttcgagcgggcaggaacggtgacgcgtcatgtgtgacgaggcggtagacggaacccaggtggacgtattgctggatgaatccagcgatggcgtggacatgtccggtatggtcacggtgcttgacagcaggcatgtgtatcagggtgcgattttcggcgtcgacgacctgcggatcgcattgccgatgcgtgacggagggcaaacggtgattcgccgtcaggtgatgcgtcacgcgccttgcgtggtcatgctggtgcatgattgcgcgaatgacctgtatctgatcgaacgggaataccgtatcggctgcgacgccttcgcctacggtctgccggctggactcatcgacgggggagaggacgtggaggaggccgcgctgcgggagcttcgtgaggaaaccggtgtggagcccgccgggcgtgacggtgtcgaattcgaccatgtggggcagttttactcgtccgaaggcatgaccgacgagcttgccaacatcatggtgcttcacctgcatgcatggcatcccgtcgaacgtcatttcgacggcgatgagcacgtcgaatcggcgtgggtctcctggcagcggctgcgcggcacccgtattacggcctccaattccatgatcgctattcttcacgagcaaattcgacgaaaccggcaaaatacaggcaagagttctttcgaatcgtaaaaataatcgccgaacaacacgaaattgcgatttgggggctgaaacgtgagatacttgaatcatgcaaatcagacccggatcgatgtatccactcggcgcaagctatgacggcgccggcgtgaattttgccctcttttcccaagtggcacaaaaagtcgagctttgccttttcgatgaggaagacaacgaaactcgaatcgaaatgaccgagcagaactcttatgtctggcacaactatctgcccggaatccaaccggggcaacgttacggctatcgcgtgtacgggccatacgacccgacgcaaggcctgcgctgcaacccgaacaaactgctgcttgacccctacgctaaagccatcgaaggcaacatcgacggcgatgagagcctctactcgtactggttcagaagccccgatgacgttaccagcatgaacacgctcgactcggccgcccataccatgaaagcggccgtggtgaacccctatttcgactggggcaacgaccagcatccgaacatctcatatcacgattccgtgatttacgaagcccacgtacgcggcatgaccaacctcaacatggacgtgccgccggacattcgcggaacctatgcgggtctggcgtacccctcggtaatcgaatacctgaagaagctgggcgtcacggccatcgagctcatgcccatccaccagttcgtcaatgacagcttccttcaggaaaaaggcctgagcaactactggggatacaacaccatcggcttctttgccccgcacaacgcgtattccagctccggacagcgcggcgaacaggtcaacgaattcaaatccatggtcaaggcataccatcatgccggcatggaagtcatcctcgacgtggtgtacaaccacaccgccgaaggcaacaaccgtggaccgaccctcagcttcaagggcatcgacaacggcgcctactaccgtctggtcgacaacgaccgcagacactacttcgacaccacaggcaccggcaactcgctgctgatgcgctcgccgcacgccctgcagctcatcaccgacagtctgcgctactgggtcaccgaaatgcacgtcgacggattccgattcgatcttgccgccacattggcccgtcagttccaggaagtcgacaaactgtcggccttcttcgacatcgtcgaacaggatccggtgatctcccgcgtcaagctgatcgcggaaccgtgggatctcggctctggcggctatcaggtgggcggcttcccgtccagctggtccgaatggaacggccgctaccgtgattgcgtgcgcgacttctggcgttcgcagccgtctaccttgccggaattcgccagccgacttatgggcagttccgacctgtatcaggtcaacggccgccgaccggtcgcatccgtgaacttcatcaccgcgcatgacggcttcaccatgaacgatctggtgagctacaatgagaagcataatgaggccaacggcgaaggcaatcgcgacggcgaaagcaacaaccgttcttggaactgcggtgtcgaaggtcctacgaccatcaaggatgttaacgagcttcgtcaacagcagatgcgcaacatgtttgccacactgctgctcagccagggcattccgatgatctgcggaggcgacgaggtggcgcgtacccagcagggcaacaacaacgcctactgccaggacaatgcgatctcctggacgaactgggatttggacgaggatcagaaggacctgctcgaattcgtatcgaagctgattcatttgaggcttgagcatcctgtgctgcatcgccgccgcttcttctccggtcgcgagcagggagacgacagcactgcgattccgcaggtcgaatggatggatcataccggctccattatggatatggacgactggtcaaacacacacgccttcactgtgatgatctatctgaacggttccgatattccggaaaccgactggtacggcaatcagatggtcgacaatgatttcattctgattttcaacgcgcattacgagccgatcatgttcaccctgcccgatgagcaatatggcaagaaatggcgcttaattgtcgacacgcataatccaaaggggccagaactcaattatgaggccggttttgcgattactgcgcaatcaagaagcttcctgctgttgatgagcgacaagaagccgtccaacaagcactacaacttctgacggcgcactcgcgttatgccgtcagaatctagtggggtggagtcgtcgccaatgcgatggctccaccccactggtatgtatatgttgaaatccggcggttgccggtcagccttgcatcagacttgtgcggcgagcctcgaaactgtgtcgggaacagtttcgctgacttccgcaagatcctcgacggagcgtggtctctcagattgcgccagtatcagctgcgtctgcacgcgatccgcttcgatggcggcgatttgacgcgagaaaatgatgaaccagccaaggaacatcatgccggccaacgcctccacattcgtcagcgtgttatgcccgctcagccattggaatccggcataagccccaatcgcaatcgcaagatcggaaaccacgtatacgacctttgagagttgcggggcaagccaaggcagggcaatcatcagcacgctcatcaaacatggtaggccgcgggcgaacacgttgtgcaaaatcggatgcggtgtgtaacggaacatgccgatacctacgaaagcgatgccggccaacgtcaacatgattgacagcagcagaatcctcgtacgaaaatgcttcggcgtctcattgatggcattggaatccagatactgcaattgcagacgatacgtggtgatgagctcggaaacggcgaaatagctgatgatcacaatgcagatgcccgcgagcgtcagcgtcgaattgaacatacgcgcggcgaacgtcgtacggtcgcccaattgagagaaattattgttgtaccagtacggatcgtcggacgtcaatcctgcgatactcacgccagacaccacgaaaaatggcagtagggaagcgatcgttttggcattcataagttccgcctgcacgaaagtgatatagcctacaacgcctgcgatggccgcgcataggatcggcagatagcctttcagcgtgcggatgcccatcatgttgttgacgatggacaacatcatgaacgatgtgacgaaaatggtcgaagcatacaccacggaaagcgcaaggatctcgaaaacacggcgaaccggaatgacccagccatgcttgagtgtcagcgaacgtgattttcgtgcgtaacccaaactgaatgaaacgactccgcatcctgccacgattcccgagcagacggtgaacagacgctgcgtgacacgccagatggccggggcgaactgcatgtatgcgttcatgacgaaccaggcgataacggcgcatgtcacaaaggagatgatgcctgacgattcggcctgctggtgacgtcccatgccactctcccttccgaaatgctattgtaagcctgtcgttgtccaaccatacgctataatagaaactcgtgttcacttggtgcgattccgtgaggcggattcgcggggtgtgaacgtgaacgggctgtagcgcagtttggtagcgcgtctgctttgggagcagaatgtcgcaggttcaaatcctgtcagcccgaccggagcccttggaaacattaggttttcaagggcttattttttccgtcgaaaacaatccgcatacaaatgctacaaacgccgcggtacctccatgcccgattcacacgagttcgcgctcgcggagggctccgatcgcgtcggccacgtcgtccaatcgttccggccagagcgctgtgtaggtgttcaatgtgatgctgggagaggagtggccgagctgcatctgcagggtcttcacgtccgcgccctgggcgatcgcgaagctcgcgtatgtgtggcgcagactgtgtatggtcacgccagcgtcctccatgccggccgctttgacggccttgttccatatccttgtccgccacgtgttcgtccagacgttcccgccacgggtggcacggaacagccagtcgtcatcacccatgccatccatctgcgccttgatctgcggcatgaggaaccgtggtatcgcgatgttgcgggccttgccgttcttcggggtgccgagcatgctgccgccgtgcccgtcgtcagtccatgtgcggcctatcctggcgcgccgcctgtccgcgtccacgtcaccgaccttgagggcaagcgattcgcctatgcggcatcccgtataggcctgccatctgaccagcagaccgtccaccggctttccgatcttctccgcctcgtccgcgagcaactcgacctcgcggaccgagaggaacaccatgtcgtcgtcggagacgatcttcggcacggtgaccctgtccacaggattctcgccgatccacccgttcgagacggcgtagtcaaagatgcccttgaggacgactttcacaatattgcggatgcttctcgcgctcagcggcttcgaatcacgcccgtccggcaacgcggccagataaccaccgtccatgagctggccgacccactcctgcagcatgtcagggcgcagctcccgcaacgtcatgccaccccatttgggcaggatgtacaggcgcagctccctcgcataccggcctgcggtgccgggtttcagatcaaccttcgacgcgagccattcgccggccacatcatccaggacacgaagctcctgacgaggatcgcggtagcgtccccgcctgatgtcgtcctccatggccgcggcatattcctgcgcttcggcgagcctggcgaactgcttcgccctctgcacacgtctaccatccttgacgatggtccaatgacaacgccagcgcatcccgaccccataacggcttttacgccacttctcaggcacattggccttcatcggatcgcgtgagttcgccaaagagcgtttgaccgcgcgactcggcggattgccatcatcgtcattcttgagccacaaatcatcaatggtcactttcatgacgcttcttcccacatgttcttcaccccggcgctcgcggtatgcgggtggccggggtcattttttataaggaatccgaacgggtataaggttctataagcacgtataaaggcgtataactattgcatgcacacgccggaatcatgaagcagctgccgataatccagcaacacctgcacggtcacacccagctccgtggccatcatccacgtattgccctcgtacaccgtctcggccatgccgtaatccaccggcgatatcagcgccaacgcggtctccctgcggcaacggcgctcgcatttgattccgtattggctgccacagccggggtcgtggtgtctggcgtggatgagttcgtggcacaatgtgcagcggcgttggaatccggccagccgttcgtcgatgatgatgagacggagcggatcgtagtagatcccgcacctgtctccggccaaccggcgttcctcgatccggactcccaatgtttccgaccaggatgtcaggatgcggtcattcacctgtttcggcatcctcgttcctgaagcccgttccctcgatgcgcttctcgtcgcgcttcgccctgcgctcgaccttcttgatgtcctccatcgccggaaggtcctccggcgcgatgccacggctgaacaggctctttcgcacggccttgttgttgtccacatgctcccgcgtgatcgccggcgtcccgtgcaggtcacgttcctggatcccgtagttcgtcatctgcgtggcgagctgcttcgccgtcacggcgatcggatggagcacatcggccagcggacggctcttcggcacatcgagcttgaatttcatttccgtcgtgctcatgccgaatagcgcctgatcgccgcgtgaacggatcacgccgaagtccttctctccgaccccgcgcttgtatgcgagcgagctgagctgcttctcctcggcggtcaacgcgtgccttcccgcgatgcgcaggatctcgcccatgcgctgctccagaagctccgcggtacgtgtctgcacggcgaaatagctttgcagcagcgcgacctcctctttgcgtggatcgccgttctgggccaccagatagcaggcgtaacgggtcagcttcacatcatcgatggaacggatggcgccgctgccaagctcgacgtcacgtttggcatcgcgaaaatgcgcttcggcaggctgtccggcattgctgcatgagactcgcgccttttcgatgaccttgctgaagttcctccattcggagtattgcatctgccccatcagatcacgcgcataccagaattccacttcgctgtcatcgatatgcatgatggagtcaagcgcgtttacgtgttgctcgatatcgtttctatccatcttttccccctcgaggttgtgaccattttgttgacgccaacaaaatggtctattgccaatgtttccaacgcctagagtgtcctgtcggatcgtcgctcactgcttggcggtcttcaccactgtggtggtgcccatcgcggtggtctcccagctgacgccgtccgccttggtgtaggtgaagtccttggtggcgtcctgcgagccgagcagggacgcctgcatcgccgcggtgtctccctggctcgtccacttccagtcgccggccttgtccggcgcattgtaggagcccttccaatacaggctcttcgtatcgccgttgtcgctgacccactggacggtgatcgtgtcggccgttatctcggcctccatccaggaatccgtgctgccggagttggtctgcttccacgtgccggtcagatccgcaggctgttctaccggcttcttctctgccggcttcttcgtcgtctgcgattggctcgcgctgccggcgtcggcggttttggcgtcactggcgttgccgcatgcgccaagcccgagaatgagcagaccggcaacggccgttgcgattgtcttcctgtacatggtttccttctttccttggttgatttgcattaaaaattcaatctcttggcgtttccgcttcaagtgccttgttcggatcgtcgttggcagccacgccgaaatcctccggacgggaagcgatacgatccaccagatcatccgtgacctggaactcgcgctcgcgggcggcgtaggctcgtgcggcatcgctgcccagggcgcgggtgtagatgtcgaggctggtgagcccgaatgtggaggcgatgtgctccacatctgacgtattcaacggcgcctcatagcgcatgcgtttgtaccagtagttattgcttaatccactggaatcaaagaattcgtcgattgatatatcgctgttttttaacagctgacggcatatgtcgatgattctcttgctgtcttcggtgacttcgtttttcggtcctcttgccatgctcgaagtttatctaaataagtagattttgtaaagaacctatataggtaaacggataaaatcacctaaataggtagattgagaattgctgcaaggcaatgaacaaagaaaggagcggcaagacagatgagtgagacggaaaccatcgcaaggaatctcagcggcgagcttgcacggcaccgcaagacacaggccgcgctcgccaaagagcttggtgtgagtgagcaatatatcagcaagcgattgcagggtgagggtccattcaccaccgagcaactcgagaaagccgccggaatgttcggcatgagcctctaccagctcatgatcaagctcctgcaaccaatcgacggcatcaaacagatcaaaccgtgagcgtcaggcgctcgccgacgcatgaatcgaaaggaaggtttttatatggaaacgataacgacctggttctccatcgtctgcgcggtggtgagcgtcatcacgatcttcatcaatctgtggctcaacagctaacggccaatgaaaacgattctaaggagaatccgaaatgagcatcaacattccggccgagacgccagacgaatccatgaacccgatttccgttgaggaattcgaacgcctgcacccggcgatgcttggcgcgataaggaaagccgtccgcgaggaattaaaactctctcacgcggacggccgaacgtcagctgatgttcagcgcacgtttgatcttcaactggtcgttccggatgtaccgctggtattcggcgatgccctgcacggcatcggccagcgacacgatggcctgctgaatgtttccagattgtgcgtaggccttcgcgtcattagcggaattcactggatcgcgttgcatattatcacctcccttctttgcgcgggtctgctcattctcccactcggcaggaaggccctcaaacgaaacacgtcggaaaaacaatcggcgcttaccaacgcatgaaaggagtggacgcgtgatggatgacaaagaggtgttcgccgcattggcggcggcgttgaagccgatgaacacgacgaaggacatcgcggacaactgcggcatcaaggaaggcaccctggcgtactggcgtagcgcgggcatcggcccgaagttcgtgaaggtgggacgaatcgtcatgtatccgaaggagcagatgatcgcctatttcgcgcaacacctgtaccagtgcacggccgaatacgaggaagaggtgggcgcgtgatgaccgacaacgactggcgtaccgataccccgtggcctgacccatgggaagaaaaggaggacaaatgaacgacatccgcaaagcctgcgtcgaagcgatattcagggaatttgaggaccatggcgacgccatcagtccggcctgcggcgacttatgggacgaaatcgaagcaaggcgttcgctcggtcacatcgtcggatacgtcgacctcgacgtggccgacctcgtggacatcgttatcgacaccattaacaaggagctgatgtgatgaaggcccttgcccacgtcatcctgcaccagctgctgttcgcggtgtggttgctggccatgttggtgctgtattgcacgccggcgtgcacgcatccgatcgaacatctcatcgccgcgccgttcgcggtgctcatcccgacggccgtcatcatgcgtcgcctgtgctccgacccccgcttcatgcgatggctggacgagcaacggcagtgaaggacttggacggttccgcacacattgcggcatggacgtggttcgtcatgcgcggccatgccggaaccgcccgcgcgtcaaggaaaagacgttaaaaccagccggacgggtcatcttctctcttctcctcccgtccggccttcgccggggcccgcgacaggatgcgggcgccatggatcggcgtgttgaggtcacgtcggcggatggatgcgcggttcgaatccgcgtcccggcacgacatcaatccaaaggaggcaaacgttgccaagcaaaacaccaagcaggccggaaggcgagaagtggttcgaatggccgctcacgcccgccagcgtcggcatgacgtccgccgagctgatcggcgaactgtacgagaccatcagcgcgctcaaccgcgaccgtggctggaacctcaccatggtcgcgccggcgcgcttcggcgagatcgtcatcgaccgcgaggccggatgcctgcgcgcgaaatgcgcgtggaaggccaaggatccaagccagctcggcccggaaccggctggatatgtgaagggagcctgacatggccataggggagaccgtcatcaccatagtcggcaacctcaccgcggatccggaactgaggaccaccggccagggcgcgcaggtcgccagcttcaccatcgccaacacgccacgccagtacaaccggcagaccggacagtacgaggacggagacgcgctcttcctccgctgttcggcatggaacgacctcgcgcagcattgcatccaatctttgtccaagggtatgcgggtcatcgcccaaggcaggctcaagcagcactcgtatcaggcgcaggacggcaccaatcggaccgtcgtggagctgcaggtcgacgaaatcgggccatcgctgcggtacgcgacggcgcaggtcgcccgcatcagccgccagggcggtcccgtctacggcaaccccgcatcgccgcagccgaccgtcaacaccggcgtcggtggctggagccaacggccgcaacagtcggcgcagacacagcaacccgccgcgccgccggccgatgatccgtggggcgcgccggcggccgaccaatcgtcatttggggacttcggcaaaccggatccggaaccggaattctaaaggaggaagcaatgaaagccagcgaacagcaggtgctcatcccgcaggaagcgacacctgacacgctcatcgacctcatcggcaagacgcagcaggtcaccaaggccgcggccgtcgtgctcaaggcatgccgcaacgtcatggacaccaaaaacaagcaggagcacatcgacaagtggggtggcatccacgccatcaccgaagccgtgtacgactgcgcggacctcgcgcagcgcatccttgacgccggcctggccatggagaacatgtgcgccaagcccgccacgtcacggcagatgatcctcatcgacgacctgcgccgcagcctcgacatggaggatggcgacgtggaggcgaccgtcgatccggacaccggcgagatcgactgaaccacaggaaggagaagaagagatgtggttcatcatcgacgaccagatggccgacgacaggcgcatccgacgcctaccgctcgccaccgtgggcctgtgggtcaaactctgcgtcatccactccaaaggcgtctcgatgcaatcgaaggacccgtcggcgtatcccggccacttcgaccagctcgacctcaaggacgccggaggcaccatgcgccagctccagcagctcatcgatgcgggactcatggaggagcacgacggcggatggcgtcccgtctacgccgaaggcatctgcagggagccacgagtgctgaccgaagagcaacgcgaggcgcgccgaaaagccggaagcaagggaggccgccgtaaggccgccaaccaaaaggccaagcaaacgtcgggcgacttgccggaaaacagccaagcaaacggagagcaaaacggtagcaaaccttctagcaagttgctaggggacagccaagcaaaaacatggcataaaaccgataccgataccgatataccctctccgacccctcccgccagcatctcgaagcaaaccgatacgccggacgccggcttcgaccgtttcgccgaagcctatcccggatccgtcggcgcgaaaggccgcaagaccgaaaccgaagcacgaagcctgtacgcggccatcgccggaaaccccgtcgaactgccccgactccagaccgcgctccgccgctacaagcacgccgtcaacgacggccaaatccgcagcggccacatcccacggctcaacacatggctccgcgaccaatgggagacatgggcgcccgaacccgtcacacccacacgccagcacaagcacacctggaactgcgaacacgtccaccagctcatggatccacatgaggacgaatacgaccacaccggaagcctccgcaacggcaacccaagcgaatggtggaaggcatgccaggcgtgcgccgacgaactcaacaaccaagaaaccagcaaggagaagcaatgagcagctaccaaagcaatcagatcaagctcatcaacacgagcctgatcgacccccaccccgacaatccacgcaagaacatcggcgacgtgaacgacctcgccgccagcatcaaaaccaacggcctcctcacacccctcagcgtcgtacccaacggcgagcgctacagggtcatcgccggccaccgcaggctcgccgcatgcaagcaggccggaatcggagccgtcccatgcttcgtgctccatctcaacccattgcagcagttggaggccatggtcaccgagaactgccagcgcgaacagctcaccgtgttggaggaagccgatgccatccagggcatgctcgctctcggagccaccaccgccagcgtcgcctaccggctcggccgaagcgccgactacgtgcgtgaccgcgccaaggccgccagcatcaagaccgaggtcagagcgtcccgcgacgatttcggccagatctccatcggtcagctcgtggccatagcgcgatacgacggccagccggacaggcagaaggagctcgcgcaggcggccggcacctcgaacttcgactacactctccgccgcatcgaacgcgacgaccgcgaccggcaatggatcgaatcggtcgccgcgctcctcgtggagcccgacaacggcatcaacctcatccccgaccccgaaaagccctacagcgacccggaatggtgctaccgcggctgcatgttcccatccaccggcacccccgaagaagtcatcgagcagatccgcgaactgaatcccgcagccgtatccatccacacggtctcgcagcaggtctacctctggacccgccgtgacaagaccgccgacgccgaaaaggaagcccgacgagccgccgaacaggccgaacgcgacgcccgccggcacgcgctcgaggaatacgccgccgcatccgccgacaagcgcatggcatggctccacggccatctccacggcgtcaaacgcgcccagctcatcgaaaccacggcccggctcggactcctgcagatcatcgaccccttcccaaacggcttcaccgacgccctcaccagctggaacgaacacagcggcagccgcaaggaatacgagaagatcagcggcatcgccgccgaggacgcccccgcggccgcgcgcatcagcctgcagaccgccgactggccactggaagccgtgaccatcctcgccgcacgcatcgaatggttcatcgacccgaccgactggaccaccgtcaacgacaccagcagacgcatcaccggctactaccaaatcctccaagacctcggctacacgcccgccgacgacgaaaccagccacctcgaccagctcgccgccgccatcagcgaagccgaccgacgaaaacgaagaagacgaggagaacaaccaatgaccagagaacaactcgacaaactcgcccaactcctcaccgacaccgcccagaccgccagcacaatcgaactgcgagcgctcgccggtggcagggcggatgacggcatcgtggcgatggcggccgggttgagggccaattgcacttcgtgtttggtgctggttgacggcctgatgcaggagggggtgcgttgtgagtgagtttgccgattcgaagcgtgccgccttggagcggcagggttggcattgcctgcgttgcgggacgaacatccatgatccgtcatgctggcctggacgctccggccatcaccgtcagctgcggcgggcggcggatccggatgtgaggcacagtccggccaacatcgtcgagctgtgcggttctggtacgaccggctgtcatgggtgggtccatcagcatgtgaaggaggccgaacgcctcgggctgatagtcccgctcggcatagatcctctctccaccccagtgcgcgactggcaggggagatggctctggctcaaccaggacggcacggccacgccattgaccatgcgcgaaacattgacaattcaaacggaaggaatgacaaatgcacgagaataacggcaaaccggaggcgctgctgtggatcgactttgagaccacaggcgtggacaggcgcaaaagcctgccattggagatcggtatggaatgtaccgacatgctgggcgaacaaaagttcggatcattgtcccgcatcatccgcccggacagactcgacctcctgtccatgagccccgtcgccttctccatgcacaccgacaacggcctgctgttcgaactcatgggaggctccgtgcgcaatgacagcatggttgtcgtggccaacgccgtggaggaattccttgactcgctctcccagcgcttctccctcgtccccgcggggaccaacgtggacttcgaccttgacttcctccgccgactcaacctcaaccctgacgcgtggctcacctaccgcaaatacgacatggccaccatccgccgactcgtcaccgtgctcggcgccccggatccataccagggcgacagcggcccgcaccgggtgaaatcctgcatcgcacgcgacatcaaagactacaaggccatgctcgagacactcgccgtcaagacgggagaccacaagtgagaaagaccatcagccacctcgccgaccggctcggagacgccatggccacgctgttcaccctcctcgcgctgctgctcatcccgcacgccgtcatcagggcgatcatcggacaggcgctccaccagtggacaccaatcacgtggctcgccatccacaccgcactgaccatcgcggcgctcgccaccagcctcgccagctacgcgatcgccgcactgctcgcaccgccaagaccggagacctaccaatgaccgaagaccagcaagaccagctcgtcatcagcctcgacacgcaatacgccgtcgcgcacgccatctacaaccgattccacgccaacggccaccgcaaacacctcacgtgggaaaacctcgacgatgacggccgcgaaccatggcgcctgatagccaaggacgcgatcaccgagatgctggccagcccggagatcggaggaacggcatgagccacaccgcgataatcctcctggcgctcgccttcctgatcggctggatgggtggccgggaatgagcatcatcgtcccattgcacaagtggcggtcggccgacccggccatcctgatcggccgccgctgcatcgcccgcaccgaccaggacgtcgtcatcgacggccggctcgaactcatccgccggccggacggcaccgccagcctccgcttccagggcatcggaaacgacatcatcgaccacgatccgaacacatgttccaacagcatgagcgctggcatacgaagcctcgccatctacggaaaggaatgaaatgcaccacacagacaccgtcagaatcgccaccaacccacgcaaatggcgcagacctgcgccctgcccggcatgccgcaagtcccggccgctcatcctgaccctcggcaccatctacaacctccgaacccgcaaaccggtcaacaccatctacggctgcatctgccccaactgccggcacaaatgcatcctccacgtcgacggcaaaaacctcaaaaaagccatccgcctctggaaccaccacgccagccaccatcaaaggaacgaacaatgagaaacaccatctgcgccacacttaccgccatcaccctcaccctctgcaccgcgctcgcaggatgcggaagcgcgtcggagccttccacgccagcgcatgcggtcaggtccgtcgactcgcagtgctccgccggggccgacgtattcacggaatgcgtcatcaccctgaccgacacgaggcaagtggactgcatcgtctactcgacggacggcaagcagggcggcctgtcatgcgattggagccatgtgagcggcgcggacaaggagccggcaagatgagctacaacgtcgtcacccaggaaggcgtcagaacgttcgagaacatcgacgatgccggcgactacgcgcaggccatgtccttgaggactggcgagccggccaaggtgttccatgccgagaccggactcgtcgcattcaccgtccgcccaaccacgaaggatacgaaatgagaatcaatttcaacagcaaggatggcgttttcgccatcaaagccgaaaacgaagaggaaaaaacccagctcaaaacgtcggcggtcgccatctgcaatctcatcatcgattttttcgacggtgaagtccaagaaatgaaggcggcgaaggaatgaaacgcatcacactcaaggacacaaaatgagcaatcgaagttatttggtgccaaggccgccagcgttcgaccatgagcatcccagaccgaaggaggaaggcgaggtgctgtactgcggaaattgccaaaaatggtacgtatcatggtttcccctcaccgaagtcaaaaccatatggggccgccgccccgaatggtggatacgcatcttccaccgcaaaccatacgagacgatcatccagcaaatacgaagggaaacgaaatgaaagtgaagaaaaccctcatggacatgatcatcaaatggcatcaggccggatacagcctcgatgagatcgcgccactgatgccacaagtccccaaagaggaaatcaaagcaatcatccaacacacccgcgaataacaagaaacccgaccttccggccgagctcctggcatcaccacaaaccagactacacccgccggagggaatcgaacaaatgaacgaaccaaccaacgaatcccaaccaacaccaaaccagacacaaccagcacaaaccaaccaacacaagccagcgctcgccggcatgtgccaagtgtgcggcggggagtgcaatctgcgcaatacgctgtgtgacaagtgcgatgccgtaatgaggggatggctccgcgactatccgtcatggatccaggtcctgcgcgagtttctggacagcaccgcacattacggtggccatcagcccggccgtaccaatttggcttcggctccgacgccggtcaggttgtctgtgattgaccatctgcaggagatcgatgatctgactgtcgctctttggcggcggttgtatgctccgccggccaggccatgggccgatagcaggattcatccgtccgtgttgaaatgcctgagtatctgcgcggattgcaatcgtctttcacgattgccggacattggtctgatttggcatgactgggagcggttggcgcgcaagacgctgggcatcatcgacgtgccgccatccaagcatggtatcggcaggtgcctgaatcctctgtgcggcgtggagctgagtgcggaggtcggcgcggtaaatgttgactgtccggtgtgcggcaacactcatcgcgtggtcgacgtgcgattggggttcctgaaggagtgcatcgaatccggcagggcgttcacggcgggggagtgcgcggagctgctgcgcgaatgcgggttccagtgcagcgtgaacacgatctactcgtggcgcaagcgcggcaggatccaaccggccggcagaaacgagaagggacagccgctgtaccgcctgtccgacgtacacgcgcgcctcgcccggcatgacgtgatttgacatttttcaaagtgcaaggcagaattgtcagtggattaaagggttcaaaccggaaaacggtttgaacccttttcatatccaccgatggattctcctaactccttgggttatatcccgtcctgtccgaacggcatatcggacacgctccgcccactcccgtcagagtgggcatacctcaatgtggcaggcaagccaatcccgtgcttccgtgatgcggtgatgctcaaaccgcctgtccatgccttcgtagaaatcagcggtagatcgcattggccacgagttcttaaactcttttccttgcggccacgtgtatgcgcgggttcgaatctcgccgaaggcacttaagcgtagaatcaatggcatggcttcaagaatctgctggcactgtcatcaagttgcgcacatgaccagaatgggcgactcatatcaaaccgataaggattcgatttgggccgctttcttcaaatgtgattattgcggatatccgaatatcgcattaatggctgcgtatgtagacgatggctttgatcgtttcgatgcgaattcggtattttctaagaacgacgggagccaaccgttcgtttggctcccagatgagcctttaggaaaggagttcgaagacgtgccgcaacatatcgcagatgctgctagcgaggcatatgcctgctttagtattcgttcctatcgagctgcgatccttatggcccgcagcgtacttgaagcgacggccaaagacaagaaagtgacgaaaggcaatctcgcttcgaaaattgatgagctggcagccaatggcgtgattagcgagcagattaaagatgaggcgcatgagatacgttatctcggcaatgacatggctcacggcgatttcactgaacctgtcagtgaggaggatgctgatgatatgctcggatttcttgcaacgtttttgaattatgtctatcagatgcctgccgctataagacggcggcaggaggcgcgcaagaacaggcgtgcgaatccgaatgtttaaggattccggggtatgaaacaatccccagtagtggcgttaagcaatccgggaggggtagtaaccggtattcgcagatgatggggagcctacaagacgcgggagtgtccatatacgggagccctataccggcattccagcaagccaacggcgaagatagtcattgacaaatccataacgccccaggccccatacacgtgggaggccacatgagcaagcggcgcaacgagcgcgtcagtaacggctggcggcgcagacaactcagggcaagagtgctagccgcatacgatgtgtgcgccatctgcggcaagccagtcgacaagacattgaagacaccacatccgatgagcgccgaagtagacgaactcataccagtctcacgaggcggcgatccatacagcttcactaactgcaggctcactcaccgcatctgcaacaggatgaagagcgacaagaccgacgaacacgcacgagcgctgctggccggcaagcagaccatcaaaccaagctcgatgccgttcaaaacgttcggcatctgactccgataccagggcggggaccccgggtacaccccctcccggtcgcctcgggtgcagtgccgatttctccccgcggattcaaacgtcggaaacaggggaaacaacgaaaggtcggaaagcgaggattacgccgatgaagtgcgaactctgcggcaaggaattccagccttccggccatgggcggcctcagaagtactgttccaagtcctgccgccagaaagcggattatcgtcggaaaaagaacaatccagctcggacaaggaaaagcaagcctgctaaagcgaagagaaaaccggaacaggaactcgacagacgaaacttcgaacgcatgatggacggttcccatgaggacacgctccgtgaaatcgtcggaagactgcgtgaggctctgcatgatccctcaacaccggccaacgcgttgccgtcgattagcagcaagcttgcagaattcgacgaacggatgcgcatggccgaggaatccggcagtctgttcgacatgaacgatgacgtgacggaggtggcggaggatgtcggagcgtcgattgtctgaaatcgcccaacggctcgtgcagccggaaggcgtcacgtcgagtgacttcaaactgatcaacagcgcggcggtcaaggccggaatccattacgacctctggcagaaaggctttctctacctgctgttcgccaaacgctccgacggcaagtacgcatgcgggtccggcggcgcggtcctgtccagctgcagacagatcggcaagacattcaccgtcggaaccgcgatgttcatcctgtgcgccgggcgcgccggaacattggtcatttggaccgcgcaccacacgcgcacctccgacgagacattcgccgatatgtgcgacctgacccgcaatccgaaactttccagatacgtgcggaacgtgcgccgagcgaacggacagcaggagatccgtttcaccaacggcagccgcatcatgttcggagcccgcgagaacggcttcggccgaggcctgcactccgcagacatcgaggtgttcgacgaggctcagatcctcaccatcaaggcgttggataacctgattccgatcgtgaacacgagcccgaatccgctgatcgtgttcatgggtaaccctccgaagccgggagaccagtgcgaagccttcgaggagaaacgttcgaccgcgttgtccggcaattcggacggcatgctctacgtggagctcggcgcggaccgcgattgcgacctggacgaccggaccgcgtgggcgaaagcgaacccgtcatatccgaaacgcaccagcgaacaggcgatactgcgcatgcgcaatctccttgccgaggattcgttccgtcgcgaggcgcttggcatatgggacgagaccgccaccgcgtacgccatcagcacggacctgtggcaggccgcggccatcgacgacgtgcctgatgggggaaccgtgagcttcggcatcgacatgcctccggacaggagcgtgctgaccatcggagccgcgctacggtacgcggacggttcggccgtcatccagatggcgaacatcaaggacgcacggcaggcgggaaccatgtgggccgtggactggctcgccgaacattggccgaagaccgccagcgtggtcatcgacgcgcagtcgcccgctatgagcctgctgcccgaactgaagaaggcgcatgtgagggtcacggtgacgaacatgcaggagatgggccgcgcgtgcggacgcttcctcgacatgctcaaggccggaacgctcaagcatccacgggacgaataccagccgcagctggccgccgccgtcaagggcgcgaccacgcgaccattgggacagtccggcgcgatcgcctggaacaagctcggcagcgatgtcgacatcacgccgctcgtgtccaccactctcgccctgtatggggcgttcacgacgaaacgacatccgggaagacgacaggaggtgatgttctgatggtggtctacatggccgacggcactacggtaagcacggcaccgaaattcaccggcagcagctacctcgataccgcgagcggcaacatcggcgctatcctcggcgtcgacgacgaggacatgcccatcatccacgaactgttgcgcgtatggcgagagaaatatccacgcaacctgatccgcggagcctactacgactgcaaggaacggttcaaggacttcggaatctccatcccggaccagatcaaaaacaaggtcgaggcgatgattggatggccggaactggccgtccgatcattgagcgatttgagcgacctggaagggttcagcatttccggtgacgacacgatgggtgttggcgacctgttcgaggacaaccaattggacgtggccacgtcagaactgatcgtatccgcttacaagcattcatgcagtttcctgaccatcgccgcagacccggaggatccggaacgaatcagtatgattccgcgttccgccgactggtccgcgggcatctgggaccggcgcgaccatcgtctggccgccgcgttgaccatcaccgaggacgataaggacgggcggatatgcgcgttcaacgtgtggcttccaggcaaggtctacgaatgctccggccacctgatgccatggcgggcggagaaaatcgaaacgaacttcgatcagccgacggtcgtctcgctcgcctatgacaggcagatggaccggccgttcggccacagccgcatcagccgttcgctcatgagccttgtcgatgctggattccgtaccgtggtccgcatggaggcgtcggccgaattctattccgttccgaaactctggttcatcggagcgaacagggacgcgttcagcagcaacacgtggaagagcctcatccaggcgatcaacgcgatcagtgccgacgaggacggcaaccttccccaattgcagcaggtgcagcaggcgtccatgacaccccattcggacatgctcaagacgatggccatgctcgtcgcctcgcagacccgggtgccggtcgactatctgggcatcacgttggacaacccgaccagtgccgaggccatggcgtccgccgaacgacgtctgacacgcatcgcagacaagcagaacgtggccttcggacgggaactcaaacgggccatgggcatcgccgtggcgttgcgcgaaggcgcgaacacgataccggactccatacgcgacgtgcacccggtatgggcaccgacaagggaggtctccgatgcggcgcgcgccgacgcgttcacgaagatcgccgacaaggtcaccggctacgccgactccgacgtcggactcgaacgcctcggcctgagccgtgaggaaatcacgcgtctacgcgccgaccagcgcaaggcacgcgcgcagaacgtcgtggatcagctcaagatccgcgcggcgcaaaacagccagcagcaggaggcgtcagatgaatctgaacaatctgaatctgcctccggaacgccgcaaagcattggaacaggtgcttgaccaagcatggaaggactaccaggacaacctcacgaacctgaccgacgcggctgccgatgaaatcgagaccgtactggaacgcgacccgttgaacgcgcgcgaaacggtgcgtgaatacacggccgtggccaaccgcctcgccgacgactattatgcgacggtacgcaccgcatgggccgaatacgctggcgtgaccatgccagacttcgaccctggatctgacctagaaccggaacgggtactttggcaggtccaaggcggcttcgccaacaccgactacaacggattgacctactcgcaggtcatggcaggccaggcacgatccggcgcgaccatcgacgacctgtggccatcattctcgaacatcgacgacgcgcaacagttcatcaccgacatgatccgcaccggcgcccgattgaccgaacgacggaacatacgactcgaccccacgaaaccaaaatgggcgagagtaccaaaaggtcccaaaacatgcgcgttctgcgccatgctcgcctcacgcggctacgcatacaccagcgaggaagcggcaggtggcaaaggcaacatctaccacgccgactgccattgccaacccatgccgaactggggcaaacaggtgctcgccggatacgacgaaaccgcatacaaagccgaatacgagcgaatgaaagcgctcgccgaccgcgaatacgatggagacattctcaaagcgtacaggagctctcccggcgtgtgcacggattccgtggtccccgaagcattgaagaagactccgggccgtccgccgaagttcgacgcgaagcatccgttcaggaccttccttggaagcggaaacctgagggatgcggtcgtggggacgaatccgatgttcgatgagggtccggaatacaggaacaactgccagcgttgcgtcgtcgcttacgaaatgcgcaggcgaggatacgcagtcaccgcgatgccgaggccgatggatcccaggacaggacttccggccttggacacggacactaaccggtggggaagctcctttaaaggcgattggcggtcttgtggctccgattcaggtcttgatggcgcttcggcgcttttggatgaatggggcaaaggcagccgcgcgttcgtcgaagtggagtggcttgatggaacgaggcatgtcttcgtcgcggagaacctgaaagacgggatacatttcatggacccgcaaaccgggtcgatgaacgtgtcaaggtatttcgaaatggtcaaccatggcatgacacgtataatgagggtagacgatgcggaacctactgaactggtgttgaaatactgcaaggagggccagagatgatattgacggatgccatcggcctcgtccttgccgaatatcccggcatgagggcgataggcgctgcggaaaattccgacgcatggatcatcggccttgatttcgccgcttcgaccagtgaacatccggtacctgggacgccaagcatcgcggtcgataaaacatcaggcgttttgcatagccttactcctggaacggatgaattctggcattacatgaccggtgccaggaaagtgcccatcccacaggtctgaaatcattccaagccacccacatgggtggcttttcttatgccatttttggtggattgccggagtagacgaacggacccgactgtaactcgggcgcttcacagccgcgcaggtgcgaatcctgcatccaccactcggccagccattcaggttggcggcgaccatgcgccgtatcgcgtgggaggaccatacagcgcaccgtggcgcggtcgaactcgaatccacgggaaacagcaaaggagagcagcatgtccatcagattccgattcccggcacgcatccgtctcatcgacggcggtggcgacgagggcggttccaatgacggtggcgacggcggtgagccgaggtcgttcacccaggaacaggtcgaccagatcgtcgagaagcgactggccaaggagcgcggcaagtacaaggactacgacgagctcaagtccaaggccatgaaactcgacgagatggagaacgccggaaagagcgaaatcgacaaactcaaggaatcgaacgcggcgctgcgcaagcagatcgacgacgccgcggccgagaagcagcacgcggaatgggtgtccgaagtcgccaaagacaaggacgttccggccgaactgctgcgcggcggaaccaaggaggaactcgaggcgcatgcggacctcctgcacgcggcgctgcatccggcatccaagccgcctcaggtgaggaaccagacgggctctccatcgcaccagaacaacaacaaggacgccgaagaactctcgtacatccaccagctcctaggcgaataacccaaccatccgaaaggacaagccatcatggcgatgaaaacagaccagatcaagctccccgtgagcgtggccaccgaaatcgtgaacaaggccaaggacaccagcaccatcgcgtccctgagccccagcacgccacagatcttctccgacgccgactacctcgtgttcaacggcaagagcgaagccgaggtagtggccgaaggcgcggtcaagagcagctacgagcagaccgtggactccgtcgtggcgaagcgcttcaaggtgcagaccaccacccgcgtcaccagcgaactccagtgggccgacgaggacaaccagctgcagatcatccgcagcatccaggccgatcaggcagccgcactgggccgcgccctcgactacgtgatctaccatgcgatcaaccccaagaccggtgaggcgctctccggattcgacccattgagcacgtccgccgtgcaggtgatcgccaccgaggatgagatcggcaacgtggacgctttggccgacgcgctgaacgactcctacgacatcaacggtgtcgccctgtccaagacctgggcgtcccgcctgcgcaagctgcgcgtcccctccaccggcatgcgcttctacccggagatcccgctgaacctgcaggccggcagcctggacggcatcaccgccgcgacctccggaaccgtcaacggccgactggccaagaccccgacgaaggtgctcgcgttcatgggagatttcagcctcatcaaatggggcatggtccgcgatctgaccagcgagatcatcgcctacggcgatccggaccagaccggcgtggacctgaaggcccataaccagatcgcataccgcaccgaggcgatgtacgcgttcgcgatcatcgatccgaaggcgttcgccgtactcaaggccacggaatgaggtgaacgatgagtttccccatccagacccttgtggtcaatccgtcgggtaagaagaagcatacgatcggaccgttggacgcgcaggtgagccttgtcaacaaggatggcacggacttctccgccggatccagcgcctacgacctgccggcggccggcgaggacaccctcggcggcattaagcagtacgcgcccgaacaagcgatcggcaacgtcgacagcaacatcgccgaggccgcggcggacactccgaccaaggacgaattcgacaaactcgtcaccgcgttcaacacgttggcgaaacagttcgacgacatcatcgccggcctcgtatccgccggggtggtcaaactgccggacaagaagtgaccatgacggacgagcccgacatgttcgccacctccgacgacctcgaacggaggtggcacaagctcaccgacgaggaactcgagaaagccgacacgcatctcgcggacgtgaccgactacatcaaggaacgctccccgaactggcggcggctcctcgacgaacggccacgactgttgacgaagatcacctgcgacatcgtccgcaggatcatgcaggccgacccgtacgacattcccggcggcatcacgcagatgaaccagaccaccggcagcttcagcgaacaatacagtttcggagcgcccaccggcgacctctggctgcgcgacgacgagaaacgcatcctcggcatcaacgcgcaacgcgcgttcagcgtcgacatggcaacgggggagacgtcctagtggaaaccatcgaaatctggcgcggccagcccaccaccgacacggacggcaaccccatccaaggcaagcccgtccccgtcggcacattccaggcgctggtcgaaccaaactccaccaccgaccagaccgaggaaaacgccaatccacaaaccatcgaatacacgatccgcatccgcggcagccagccgacaggcatccaaaccaccgacctgatcaaagtcagaggcatcctcctgcccgtcaaaggcaaaccgcaagtgtggaacaacatccacggacgccacatcggcgacgtcatcaccgtaggcgaacggaaaggataagcatggccaaacgatgcagattcgtattcaaccgcaaggcattcagccaacaggtgctgaagaacgagacgctgcgctcgcgcatgcgtgactcggccaacgaggccgtcaccgacagccggtgcatggtccgcgaccatgacggcaagaaccgcagcggcgtggccatcctctgcccggcacctgtggagaaggcgcacggcacgctagaggacacgctcggaaggatgcgcgtatgagcatcccggtcactccccggcgcacggaacccctgctcctgcccaaactgaggacactgttcccggacgtgacgttcgacaccatcgaacgaagcgacctcgaacctcccttcaccgaagccacgctggccgactccatgcaaggcatgagcaccccaatctcgcagtacgtgcggctgcggctgagcgtgcgatgcatgagagaggaccatacgggcgactgggacaaggccgcacgcctgtgggccgacatcgcgagggagatcatcgggctcggaaacgtcgcgccgctcatcgacgcgtcactcgaatccgggccggtacgcatgacggacgaggacaagagactggtgtgcgcgtacggcgtgctcctgctcgaggtcaccgtcaactgaaacacaaccaaagacaacgtgccgccacacgcgaagaacggaaaggtgcagacgaatgtctgacaacaacgaaaaaaccaccgtcgccgcgcagggcgcgaccgactatgggtacgtgtccagcggcaacaccgcaggcaacgtgcgcctgatcaagaactacgcgctgttcctgttccccaagggcgacagcacgttcgtggctccgaccggagtggcctggaccccgccggcaagcaagaagccgatcggctactccacggaggacggcgccgtcctgcatccggaaccgggcgacagcaccgactacaaggcccacaacggcgacatcgtgctgtccgacacggatccgggctactggaccctgcagctcgccgccatggagggccgcaaggatgtggtgtcggcctacttcgacgtggacgtcgattcggacggcggcatcagcatcaagggcgccggattgaagaaggagtggatcctcgtgctggtcgcgctcgaccagcaggaccgtccgttcctcctgtacggcaccaacgcgaaggtgagcgaccgtgacgacgtgagcctgaaatccagcgagatcatgaacttcagcatgacgttcaagatgctcaagggcaccaacggcgaacagttccacgcatggggcctcgtcactgaagacgccaagtgacccattgattcttcccgtgcggccgatggcggtcggccgcacgggacacccattcaaccgccaaccattagaacggagccaacatgagcgacaaagaataccatgtcgtggacgtagacctgaccgaagcggaagagctcaaacccgacgtgcacctcgaggtcgccggcgtcaaactcgacctgccgaacctcaacaacgcggaactgcccatcgaactcgtccaggccatcctcctggtcaaaagcaagcccgcattgtccgacgaggaaaccacggcctgcgtgagcacgttcctcgcctacttccagacgatgcagccgaacttctggaacgtgctgcgcaagaccaaacgtccgatggcctacctcaccgcgaccatcaaggcgtgggccgaggaatccggactggacccaaaagcgtttacctcgcccacctctggaacaacaatcgcgcggcactagcctacgactggatccgagcgtacgggcagatctacaggcccgtacgcttccgggaatgggttgaaggccaacgtccacgagtcgattggggactcgcctgggcgttgacccgcgaaatcctcaaagaccatacgagccactcgtggatggcgttgcagaacgccgtctacgcgcccgacggagccgaacaggcggtctggacgctgtccggacaacgcaaacgcccatggttcgaccacgagcacgacccgctccgcccgccaaccccgacgcacaacctcacccgccgtcaacgcgaggacagggaacggctcaaagcctacttccacatcaacgacgacctctgactccgaccgccatcggaatcccaacctacgaataaggaaacacgatggcagcacaggacataggcgtcgcatacgtccacgtcgaaccatccggcaaaggattcggcaaaagcatcgaaggcgacatcggcgacgccgtcaacaaagcctccaagaaaagctccaacaccctcatctcgaagatcggcggagcattcggcaaaatcggcaaggtcggcacaggcgcgatcgccaccctcgccggcggcatcaccgccctggccgccaaaggcggcttcacccgcgccctcaacatcgagaacgcgcaagccaaactcaaaggcctcggccacgacagcgcgagcgtcaccgaaatcatgaacgacgcgctcgcctccgtcaagggcaccgcgttcggactgggcgacgccgcgaccgtcgcggccagcctgtccgcctccggcatcaaggagggcggcgagctcaccaaggtcctcaagaccgtggccgacaccgcgcagatcagcggccgtagcctgaccgacatcggcatgatcttcggttccgtcgccgcccgaggcaaactccagggcgacgacatgctccagctcatgtcgagcggtatcccagtcctccaaatgctcggcaagcatctgaacaagaccagcgccgaagtgtccgacatggtctcggacggcaaaatcgacttccaaaccttcgccgacgccatgcaggaaggcctaggcggggccgcactatccgcaggcaccacattcaccggcgccctggccaacgtgaaagccgcgttgagccgactcggagaaacagccgccacaccagtcctcaacggcttacgcggcctgttcaaccaagccatcccactcatcgacacattcaccgcggccgtcacaccaaccctgcaaaaagtcggagcggcactccaacaaggtctcgagaacgcgatacccgccacacaggcgaaactcaaaaaccttggcgacacgatctccaacattcccggcttccagatgctcgcctcggcgacggccagcctcaaaagccaactcactggcctctggaacgcaatcacatcactcataggcggactcaacaatggcggcgaagccgccacaatgttctccacaaccgccggcgcgctcgcgggagtggtcgcttcggtcgcgcaggcgttgtcgaacgcggcgggatgggcgaagacgttcgtcaacacgttcatcgagacgggcgcgttgcagccgttccttgaaagcctgaccggcgtcatctccggattgggctcgctggtttccggattggcggccgcggtctcgcaggccttcggcttcaacgacagcgcgcgcaccgccagttccgcggcgcagagcttcgccggactgttgaacactttgaccggcgtgctcatgaccgtgggaggctggctgcagtcggtcggacagtgggcgcagcagaacggcgcactggtatccggcgccctgaaagccatcgccgtcgcattgctcgccgtcaagggctgggacatcgtatcggccgggctgaaaacggtttccagtgggttgaaggccatttccgcgactgcctccggtgtggagaagaccgctacggccacgttcgatttgattggcaagatctccgacgcgggaagcgcggctggaacactgaagcaactcgccggctcgttcaatattgtcaaggcagctcaatcggcgtggagcgcggtgaccaaggctgctaccgccgtgcagctggcattcagcgctgccttggatgcgaatccgatcggcatgcttgtcgtagccatcggcgcggtcgtcgccgcgctgacatggttcttcacccaaaccgaaacgggcaaacgactctggaacagcttcgccacatggttcatgggaatctggaaccagatcagcaccgcatgccagccaatcctgcaagccatcgccacattcatcacccagaccatgagccaaatccaacaaatctggcaaaccggatggacactcatcaccaccatcctccaaaacgtctggaacacgatcggccccatcatcatgaccgcgctcaccgcgatcatcaccggcatccaaacattcatcaccaccatcacaccactcctgcaagccggaatacagaacatccaaaccatcttccaaaccgccgccaccatcatcagcacggtctggaacggactctggaacaccatatccaccgtcgtacaaggcgcatggaccatcatcgccacaatcatcagcaccgcactcaccgtcatccaaggcatcatccaactggcgctcgcggtcgtcaacgggaactggagcgccgcgtggtcggccatccagggcatcgtgtcggcagtgtggggcggcatccaaggcgtcgtctccgccggcatcggcatggtcagcggagtggtatccgccgcatgctcgacaatccggagcgtgtgggccgcgttgtggaatggcgtcggaagcattgtgtcgagcgtctggggcggcatcgtcggcaccgtaagcaacatggttggccgtgtcgggagcgtcgtgagcgggatcggcggaaccgtccggagcgcggtgtccggcgcgggaagctggctcgtcagcgcgggacgcaacatcatccagggattgatcaacggcatcacaggaatggtcggctcgttgtattccagcatcaccaacgcgttgtcgggcttggtggacaaggccaagaacgctttgggcatccattccccgtcgcgtgtgttccgcgacgaggtcggcgtgatggtcggacgtggcatggcattgggcatcgacgattccgcgcatgtggtcagccgttccatggattcgctcgtctccacgatgagcctctccgacgcggactggtcgaagaccggcaggctgaacgtcacggccggcaccggcgccaatgccggcgacggcgatctgcgggaactcatcacggccgtcgaatcgttgcacgacgacctcggatcgatcatcgccaggtacacgccgacgataggggaccgcgacttcgcaaggaaggtgagaagtgcaatcgcttgaatacgtgtgcgcggccacaggtgagcgcatcggcttcgaggggccgctgtacggcgagacgctcacgggactgcgcgcccgcgtctgggactacagcctcgcctcacgtggcatgacgggcatcacccgcaaggcacgcgaggcgacagtcaccgtgaagatccacgattctccagccacgctcgacctactgcgccgcctcgcggacgccgacatggcatccgggaacccgggcacgctcgtggccgacggcgaatgggaagccaaagcgtggatcacgaaaagcgaaccgcaatccatcacgcccacgatggtcgagacgcagttgaccatcgtgctggccgatggcgtgtggcgccgtccgaccatgacgcatttcacgccgcgatacgattccggaaccgccgaccttgactatccatatgattatccgcatgatttcgccggcatggcattgggtgccgagatcgtcaacgacacgtccatcccgcagccggtcaagctcacgatattcggaccatgcgcgcaaccgtacgtcatcatcggaaacaaccggtacgaggtcgacgtgaccgtgccatccggctcgcgtctggaaatcgacggcaccggcgatgtcaggaccgtcaccatggtcagcggcacaggtctcgccacaaactgcttcgcgcaggccgtgcgagggtcgggcaaggattccggccggtacgtgttccaaccgctcgcgcccggaacacagccgatcagctggccgggaggattccaattcgacttgacggtctgcgaggaaaggagcgaaccgccatggacctgatcgtcaccgacgccacaggcaaacccgtggcgagccacgcctcatacacgctcgacctcgcgttcggtagcggggagaacgacttcgacctgcaggtcgaagacgccgcgctcaaggcggggagccgcatcatgatcgacggcaccgagtacggcggcatcatcgacgacacggatgtcgacgtggacggaggcctgtccaccgtcacatggcatggccgcgactggcatggagtactcgcctcgaagatcatcgaaccggacaggaacaacgattacctcaccctgtccggcacgattcccgtcatcatgcgcacactcgtcagccgtgcgggattgcaaggcctgttcaccgtcaccgacgaaagcgccgaccacaagaccacctgccagttcgaccggtacgtggacctgtacagcggtctggtcaagatgctcagggcaagcggactcaaactccggttgcgtaatgacggcgacaaggtatccatgagcgccatgcccgtccgcacgatcggcgacagcatcgactcggacctcatcgacttcaccgccaaacaggcggcgcacccgatcaaccatctcatctgcctgggcaagggcgaactcaaggaccgtaccgtcatccactggtacgccgacgcgaacggcacgttcagccacacgcagaccctcaaaggccttgacgaacgcaccgccacatacgagttgtccaacgccgaagccgacgagctcgaggacaagggcaggcagaaattccaggagcttcggaacaccagcaccatcgacgtggacattcccgacggcatcgacgcggacgttggcgacctggtcacgggtcgtgacaacaacacgggcctcgtcgtcactgccgagatctccaagaagatcgtcaaggtttcgggaggcgtgctcaccgtcacctacgaatccggaggcgccagcgccggcggcaacagcggagaatcctccatcggggatggtggccacgcctactacgctggagccggcctcaaactcgacgcctggacgttcagcgccgacgtgaccagaaacgacatcgactcgctcaacaacgcattgtcgggtaaacagccgaaaggcgactacatcaccggcctgaaaatcggttcggtggacacgctcgcccccggtgcacaggcaagcgcgtcgctcacgggcgccggcagcgacaaaaccttgaatttggggcttccgaaaggcgaccagggtccgcaaggggagaagggcgacaagggcgacacaggaccacagggggccaccggagcgaccggacccaccggtcctcggggagagaaaggagcgaccggggagcgagggccgcaaggcgtcgccggtcccgaaggcccgcagggactgcaggggatacgcggcgagaaaggcgataagggtgatgccggcgcgatcggcgcggcgggaccgcaaggcccgacgggttccacaggtccgcagggtcccacgggtccacagggagcgaccggcccccagggcagacaaggcatccaaggttcccaaggcatccagggcccgcaaggggagaagggtgacaagggcgacagcggcgtatccgccccctcgaacggcttcttcacgctcagcatggaaggcgacggcgacctgtacgtgaactatccggacaacacgaacccaccctcgttcgtctgggactccgagagcgggaacctgtacgtggacatcccggaaaggtgacacatggcgcgactattgatcggcaacatcaaaggccccaaaggtgacaagggcgataccggggccaccggcccgcaaggcaagcaaggagcgcagggcgttcagggagctaaaggcgacgtcggccttccggcgctcgtgatgaagaaatccctcgtcggcgaatatccggtgggatccactttcacgggaaacgtgagcgaatggttgaaccgaacaccactcgtcaatgaatattcgaccgcattgtcaggtggcggaaaatacagcatcgtctggcagtgcgtttcgcaatccggcggccagttccaagggaagacggtttccaggcagtccatcatcggaacgcaaggccctgtcggcccgcagggtccgaagggtgacgtcggcccgcagggtgtgaagggcgataccggcgagatcgggcctaaaggagccactggagctgccggacctcccggtccgcaaggtcctgaagggctgaagggcgacaagggtgacaaaggcgatgtcggcccctccggagaaggaggccccaccggtcccactggcccggtaggtccgactggtcctgccggacctaccggagcaacaggccccaccggcccgcaaggcaagcagggaatacaaggtgcgcagggactgcagggcccacagggaccgacaggaccgcagggtgccagcggcgtgacggcgccaacttccggattcttcacactgcaggtcgacccgaacggagacctgtacgccgtgtacgcggatacgaccaccgcgtcggcggctcccgtctcctacgatccggcgacgggcgacctgtactacatgatcaatgacggaaagtaaggagcgcatatgacgaagattctgctcggcaacgtcaaaggccccaaaggcgacaccggaccgcaaggcaagcagggagtgcaaggaccgcagggccctgccggcgccactggcgcgaccggggccaccggagcgaaaggagaggccggccaacgcggcgagaccgggttgcctgccttgatcatcacacgcatactatccggatactggacgtccgcatgctcggattttgactggcgggcactcagtttcaaccgtgccccggtcgtaggcgaatacttcttcgccatgaccaatggcggcaagaacctgatgtacgcacagatcacagccaccgggaaaaacgtgacgttcaaaccggtttccaacacaagcctcgtcggcccgaagggcgacaagggcgagacgggcatgagcgcaagccaggcgttcatcgccgcccacccggtcggctccctctactggaccaccgccacaacaaatccgggaaccacctacggcggcacttggaaggaatgcaacaccatccttccgggacacatctaccagcgcacagcctgaaagagaaaggaacatcaatggcacgaaccacgaacatcaccagatacacctgcgaccgatgtcacgcctccgcatacctcgccgacggtgacccacgcacctccagcgactggcacgacatcacccacaccaccgtcgacggagtcgcacagggcgcgctcgtctgtaccgcatgctggcagacgttcaaagcgctggcagccacgcaggacgccgcctacgccgcatacctcaacaacacaacagataggaaggaatgaccatgaccatgaatctcatcaccggcaaggccggcgctccgcacatcacatccagcgaccaaggagccatgcaggccggactggtcggaaacggcaactacctgctgcaaggcggcgacggcaaattccccgccgtgaccatgcagtcagcaaacaaggcgctcgtcccggtcctcaaccttgtgatcgaaggacgatacgcacgcgtcaccgcggcggaaaccgtcaccatcgaaagcggagtcacaggacggaaccgcaacgacctaatctgcgtgaaatacacgcgagactcgaacaacatcgaaacgatcgcgctcgcggtgctgaagggcaccgccaccagtggcacggcggctgaccccacggtaccgtcgggtagtatcctgaacaattccggcaccgtatggattccgatcgcccgcattccaatcagtggcatcaccgctggaactcctgtcatgcttgtcaagcagttgcctccgatgagccaactgtgggattccgtaaccctgtaccaggattccaattggatcatcatgcgtaacggcaggatgattttgatcaagttcagtgggaaaatcggttcgggcagttgggatgctgttgaatgtccggcaaagctcgcgtcctggtatcgtcccatcgttgacttgtcgactgtctgccttgtatcaaatgggcaaacggcgcgaagcctcacggccagagctaatggaactatccgagtggcgaacatgggaaacgttggcagcaatcaggattgcgtcggcacgctttgtttcccaatcccatgatttctagctttccgtaaccctcaccagatcgaaccagaattggaacgtgaattaccgtaccgcgctggtaggcaagctgttgatcgtcgcattccacgcaatccgagtcggtagcgactggaatgcggcgaaagaatgggagacatccccgcttttcacactcccagccggtttggaggccgcgttcgaggtgcattgcgccgcggtgtccaattcgagcgtggggcttcatggcgtcgaggtgcagaccgctggcaacgagatcgtccttcgctcgtccgcgaagatgacgatcggcaaaggcggttgggtcgagggctgcatcacggtgccgcttgatcgttgattagacgaccggatagcagagcgagccaacacaaccctgattgctgccagcggctcccatgttcgcgcatcgaatggttccgttcggattgacgacgagcattctcgccgtctgcccgttggagacgcacaccatcgcattgacttcgaccggaggacgcagttcggcgggcagcacgtattcgcattgcactgaatcccaactgccattaccgatattgccagagtatttgaccagcatcatcatgccggtgcggatgacagtgaagcccttcgcgttgtacagggttacggaaagctattcaggcgagaatgtaggtcatcgtcccggagaacgtgccgctgttctgccccgcgccacaattgacataacggaaattgccattcgtttccagaatgaaatcacgctggctgccaccatcacgccccgaccacgtgccatgcgtgacgaccgcaggcctccaaccctccggaattgtaccgaactgtccactgccccacgagtcagtgctcgcgcttttccagttgatgctaatctgcgcgatcttgccagacttcacgccagtcacggtgccatactgtgatttaatcaaagtctgggttacggaaaactattccgccatccaacagccgtgcgccgtggagtaagcggatttcgggtcgccaagcatctgcaccttcccatcacgcatgacaagcaggctgaaaccgcaggacgggaacgatatgatgctctggtcggcgagcggacggaacgcttctgggatggtctcattcgccgtcgagtagttctgctgtccactgccgtcgaacttgacgttgccgttgatcgtgacgatgcgtccgacgcgacatagagtgagtctgctgttcgtgtatggaggtttccatggctgggttacggaaaactattccgccatccaacagccgtgcgccgtggagtaagcggatttcgggtcgccaagcatctgcaccttcccatcacgcatgacaagcaggctgaaaccgcaggacgggaacgatatgatgctctggtcggcgagcggacggaacgcttctgggatggtctcattcgccgtcgagtagttctgctgtccactgccgtcgaacttgacgttgccgttgatcgtgacgatgcgtccgacgcgacatagagtgagtctgctgttcgtgtatggaggtttccatggctgggttacggaaagctattaaaagtggatttccacgattccgcctgtgacagccacctcgggaccaacgagcaggttgacggtcccgtccggcgcgatcgatacttggactgaccgctgcagatatgacgggtgaatgaatggaatcgccactgtcgtcccagacgatagtatggctctgccattcaaagccttaatcgcattcggattgggtattttcccgattggatagattcctccgttgccattgcttttcccaaacggcagggttacggaaagctattaaaagtggatttccacgattccgcctgtgacagccacctcgggaccaacgagcaggttgacggtcccgtccggcgcgatcgatacttggactgaccgctgcagatatgacgggtgaatgaatggaatcgccactgtcgtcccagacgatagtatggctctgccattcaaagccttaatcgcattcggattgggtattttcccgattggatagattcctccgttgccattgcttttcccaaacggcagggttacggaatgctatttcaccggccagcagccgcagacgcggaaatagtatccgctgttcatgctgccgctgagcgcgaccttgccgccagagtcgaaggacaaggctccatgctgcccgttcacaccttccagcagtatcgcgccttcactctccggcaggaaaccggcgtccatcgtctcattcacgatctggccgttggaattgatgttggacgtgaaggacgtgttgccaaaagcgaaagccatcatgccgaccttggcgagatgtaccgtcatgccgtaaggcccatgccagatctgacgttcaagggttacggaatgctatttcaccggccagcagccgcagacgcggaaatagtatccgctgttcatgctgccgctgagcgcgaccttgccgccagagtcgaaggacaaggctccatgctgcccgttcacaccttccagcagtatcgcgccttcactctccggcaggaaaccggcgtccatcgtctcattcacgatctggccgttggaattgatgttggacgtgaaggacgtgttgccaaaagcgaaagccatcatgccgaccttggcgagatgtaccgtcatgccgtaaggcccatgccagatctgacgttcaagggttacggaaagctagaaatcatgggattgggaaacaaagcgtgccgacgcaatcctgattgctgccaacgtttcccatgttcgccactcggatagttccattagctctggccgtgaggcttcgcgccgtttgcccatttgatacaaggcagacagtcgacaagtcaacgatgggacgataccaggacgcgagctttgccggacattcaacagcatcccaactgcccgaaccgattttcccactgaacttgatcaaaatcatcctgccgttacgcatgatgatccaattggaatcctggtacagggttacggaaagctacgcggctccgatgatgagtctttcccatgcccgctgcagacttctcagcacggacaaatcggggcggagatagtagcgggcggttgtcttgatgtcgctgtgaccgagttgtcgtgcgaccactgagatatcggctcccgcagcgattgccagagtgccgaaggtgtgcctgaggttccttggcggcacgcaggggagtttcatgcgttggcaccatgacgtgtaatgagctgccacctggttggcgttcagatcgccgaccagcctgccggttctgccgtggcgcaattgcgcgagccgtttgactgcgaaccgtggtagtgcgaccgtccgtcggctctggtcggtcttcgggtcggtgaccgtttcatgtccagcgacccattgcactgaccttttgacggtcacggttccccggcgtaaatccaagtcggcccattcaatgccgacggactcgcatcggcgcagtcccgcgcagacggagaccaataaccaggcttccaacgcgtgaccgtagaagcctttgagcagccgtcttacctgtctggcgtcgagcacgcgcggctcataccgccgcaggtgcggcagtctgatttcacgacgtgtcacgtcattgtcggtgactcccttgcgataggcgagtcggagtatcgcccgcagcacggcccacgccttgcgcgcggcgccggcctgattgaacgagccgagccactcctcgatgtcgttcgcggtgatcgactccatgtcgacatcagcccatttcggctggatgtggcagcggtaggtcgactcgtagcccaccctcgtgcactcgcggagcttcccgcaggagggccaccagacctcattcacaaacgttcccaacaacatttcaacctccaaaatcccacacgtggttatcgcggcttccaacggtagccacgtgtgggattttcctttcggaaggattcccaatgagccaggaaaccatcgtcgcaatcgttatcgccatcatcggcagcggaggcagcggcgtgttcgtcacctggattctgagcaaggtcgaccaacgtcacgatccactgcatgagggcgtcagggaactgttgttctgcaaactcgaggctctgtaccgtcagatggtcgatgcaggtggtgttgcgagcattccgttgaagcaaagcgcggaacgaatatatgccgcttaccacggtctgggcggcaatggaaccggaacctcgatgatccaagacatacgtgacgcgcatatcgcgaacacagattgaaagattcaaaagatttccacaccgtccgtacaaggcggacggtacggacaaaggaaaggagaggaattgaacatcctcaacaaaggcaagccgaaacacaagcgcatgaatccacgccgacaatggcgcaagctactgaccgcgctcgcggtcgccatatccatggcggtcgcgccggccgcgatggccgacatgaacgggtacgacatctcgaactggcagtgcggcatcgacaccgcgaccgtgccggccgatttcgtcatcgtcggcaccacatggggttccggcggcgtgtacggtggttgcctgtccaacggcgtcaacaccgacgctaaccgtcagctcgccggcgccatcgacagcggcaaggagaccggcgtctaccattacgcgcgcggcggcaaccccgagaccgaagcccggttcttcgtcgacaacgtgcgcggatacgtgcacaagagcgtgctgatcctcgactgggaggcgcaggacaatacggcatggggcgacaagcagtggccgcgccgctgggcgcgcgaggtcaagcgtctgacaggcgtcaaccccatcatctacacgatggactccgggtactggcaggtcgccggcatggagacggagctgaactgcggcatctggatcgcacagtacgcgacgaacctcgtcaccggctaccagaccgccccgtggaacatcggagcgcgcggcgaggtgatgaggcagtacacgtccaacggcagtctcagcggctggtcaggacgcctcgacctgaacaagttccgcggcgaccgcgcggcatggcgcaagtacgcgaaccccgacgacaagggcacggcgagcctgccgaacgtcaagccgacgccacagccaacgacagctccgacggtcgacctggacgctttggccacgcgcaccatccgcggcgacttcggcaacgatcccgcacgacgacaggcgctcggatccaactatgcggcggtcatggccatcgtcaaccggcgactgtccggcagcggcgtcacgacgccatctggcaataccggctactgcgtcgtggtcagctccggcgacaccatgagcgcgatcgccagccgtaccggccgcacgccggccagcgcgtggagcgtgcccagcggcaacatcaaccgcatctggccaggtcagcaagtctgctacggcgggtccaccgcctctagtgtcggtgcccatgtcgtaactacctcgcacgtggtcaccgcaggcgagagcctgtgggtcatctacggcccgtcgggatggcaggcggccgcgcaacgcaacggcctcagctacccctacgtcatccaccccggccaggtgctccgctgataaaacactcccgcaacgtaaacgttgcgggagtcatatctacaacacttggaaaggatcaagatggacatctccaacgcaacggcgctcgcatccgcgatcgtcgcactcgtcgcaccggcattggtgcaggcgttcaagaaatacatcccaggcgattacgtcggactggtaagccttggctcatccatcatcctcggcgtcatcgccgtcggcgctaccggaggcttcaaccacgcgacatggggagtgacgctcgccgcagtggtgggcgtctcgcaggccgtgtacgtgctggtcaatcaggcattcggcggcaagctcagcaaggatcagatctctgactaagagtccatatatagccatatagccccttccgtggtattcgctccatggaaggggctttttctttattccgcatacaaaccgcatacaaagaccgtcacgttgcgttccatacagtcataaccagtcacaacttgcaggatggcaaaagcgttgaaataccaacgtttctcaatctccaaacattctgtcaaaccaaacctaaaaaccaccagatataacagaatgtcgcaggttcaaatcctgtcagcccgaccaaaaccgttggaaacaaaggtgtttcagacggtttgaaaaatcctttccccggtttccggtacaaacacgacgatcgcgggaattcctcgtggcattttgtgatattcgcatagttctgtccgcctgggttttcaaacggaaatggtatggatggcatttgattgtcgagttcgagcaagatacgggtgctgtatggcgagattgaagcgttgttttcctcgggttttggatacgataagccctatgaacgcatctcaagagaatctttggtcggcgccgtttgccggcaagccgctcgacgccaccgttgtggtgccgggcagcaaatccctgtcgaaccgttatctcattcttgcggctctcgggcatcgtcctgtgcgattggtcggtctgttgcgctcgcgtgataccgagctgatgatggacgcactgcgttcgttgggagtgtgctgcgaaatcgatgagcaggttgacaccacggttacggtggtgccgccgtccgacggccggttccacggtggtacgaaggtgttctgcggtcttgcgggaacggtgatgcgctttgtgcccggtcttgccatgttcgcggacggtcctgtggatttcgacggtgacgagcaggcgtatgcgcgtccgatgaagcccgtgttggacggtcttgaacagttgggggcatgtatcgaataccacggcgaggaagggcgcctgccatttacaatcattccacctcaaacggtgagccagtgcgccgagccgagcgtagtcagcattgattcttcgggatcctcgcagtttatttcgggactattgctcgtcggctctcgagtgccaggcggtttggaactgcatcacacgggggagaagacaccgagtttaccgcatattcgcatgaccgtggccgatctgcaaggttccggtgtgcgtgccaacgcagacgaacacgcccgcgtgtggaccgtgcagccgggagccgtgcagttgcccgaaaccgtgacggtcgagcctgacctgtcgaatgccgccccgttccttggcgcagcgctcatcgccggaggaaccgtgcgcgtgccccattggccggaatccaccacccagccgggcggcctgcttcccggatacttggaacatatgggcgctgaaatcagcttccccgtgatcgacggcgtccggtactgcgaagtgaccggcagcagccatatcaacggcttgggtgatttcgacctgactgcggccggcgagattgcgccatcgctggccgcaatcctggtcttcgccgacaagcctacgcgcatgctgggcatcggccacttgcgcggccacgagacgaaccgtctggaagcattggtcaacgaaatcaccagagtcgggggagaagcccgtgagctggccgacggtctggagatcgtgccagtgccggcaacgaatctcaggccggctgaaatggaaacctatgcggaccatcgcatggcgacgttcgctgcgatgctggggctgaaaatcaacggcattctaatcaagaacatcgccaccactgcgaaaacgcttcctgatttcgcaaacatgtggaccagcatgctggcctagcaatgattgtccaggataatccgcaaataatattgaaaacggtatgaaaatgtccttcctccgcaaaaacggaggaaggacattctacgtttgcacaggatcgtaatcattctgcggatgccgctatgtcaagccacgatggttcttagctttcctgacacggcttggccttgtccggccccaacatggcaaaggtagtggcgctcgcaaacgtcataatgcctacgaaaaacacggaaccaatggaaacctgacaccgtacgtaaagaggtaagcagcgacgaggcgtccgacaccttgagaggtgttatctggctcgagcctagaaggcggaaagcatgatgaagccccggaagtttcgcactttcgggggcttcatcatattgattgcgattttgcgttcagtaacgaatcagcttggaatcactcccactcacttgtttgaactgggagaggcattttgcgccccctctaagcaaaaatttttcaactttttttgaaaataaaaaaagccgcctgttttaaatttgaggtcaacagatggcgggtagaaattttcatatttatgatgtataatatgtgatattaaagattgataaatcagaatttgtaggtgcgattgatgaaaattattgaagttaaagaaaataaaaaacaatatcttgatttgctcctattagcagatgagcaggaagatatggttgaccgttatcttgataacggcaagatgtatgtacttgatgataatggggtcaagtgtgagtgtgtcataaccgataaagaaaatgacatacttgaaatcaagaacattgcgacggttccagaatatcaagggaaaggttatgcaagagccttaattgagtttattgttaataattacagagagcaatatgccattctgcaagtgggaacaggcgatagcccactgacaataccattttatgaaaagtgtggttttgtccgttcgcatatcatatcaaatttctttatagataattatgaccacccaatctatgagagtggaatacagttggtagatatggtgtatttgcaaagaccgttataatttaaattcaagtttatggagagtcaccgttatgattagagaatttaaaagggatgatataaataaagttgcagatatatggttggatacaaatataaaggcacataattttatccccgccgaatactggaaaagcaatttcaaatcagtaaaagaagcgctgttactagcagaggtttatgtgtatgagtatgatacagaaatacagggttttatagggttaaatgatgaatatgttgagggcatttttgtttctggtgaaatgcaatcgcagggtataggtaaaattctgctgaattatgcaaaggataaaaggaataagttgcacttgaacgtataccaaaagaacgcacgggcaatatctttttataagagagaaggatttgagattcagcatagtggcttagatgaggctaccggagaaaaagattatgtaatgacatggcaacacaaatagaaattccagtttatcgaactaaaacataagaccgcttacatcgtgtaggcggtcttatgtcgtggcaagattatttgattttgagctttcttttcttggcagaaagcactttgcagagaacatcatcgacggcgtcggtgtatctgccttgttcaatcaatttgtttttttagatttataaggaaagcaacaatttcgtttctttcttttgtacttaaatatatatggtatttttttctgttttcatactatccacctcgctgttttatctgatttgatgatatattaaagagaaaattttatcaaatatgcaaaaaggcttctgcccaaaacagggcaaaagccttaaaaattatgcgatttttaggtttagttgcaagccaagggggactatttcatctgttgcaaaatcggttgcccgaaaagtaccaagtcccgaaacccgcataaatactgggtttttcggcacatctaaaccaaggggaactactcccactcgatggttgccggcggcttggaggtgcagtcgagcaccacacggttgatctgacggcattcattggtgatacgcgtcgaaatcgtggcaagcacatcgtacggaatacgggaccaatcggcggtcatggcgtcttcggaagaaaccggacgaagcacgatcggcgaaccgtaggtacgctcgtcgccttgcacgcccacggaatgcacatcggcaaggagcacgaccgggcactgccagatatcgcggtcaagaccagccttggaaagctcctcgcgagcgatggcgtcggcctcgcgaagtagatccagacgctccttggtgatctcgccgatgatgcggatgccgaggcccgggccagggaacggctgacgccagacgatttcgtccggcaatccaagctcggtaccgatggcacgaacctcatccttgaacaaggtacgcagtggctcgacgagctggaacttgatgtcgtccggcaggccacccacattgtggtgcgacttgatgttagctgcgccgtcgccaccgccggattccacaacatccgggtagagggtgccctgaacgaggaacttgacttccttgccggaagcacccgcctcttcgatgacctggcgctgagccttctcgaacgtgcgaatgaacttttcgccgatgatcttacgcttcttctccggctcgctcacacccttcagggcggtgaggaagtcttcggaggcgtccacggcgatgagcttgatgccggtcgcctcgacgaaatcatgcttgacctgttctgcctcgcccttgcgcagcagaccgtggtccacgaacacgcaggtgagctggtcgccgatggccttgtgcacgagagccgccgcgaccgcggaatcaacgccgccggacaggccgcagatcacctgtgcgtcgccgaccttctcgcggatcttcgcgacctgatcctcgatgatgctggaggcatcccagttgttgccgagccctgcgcacttgtgcaggaaggtctcgatgagctgctggcccatcggggtgtgcttgacttcaggatgccactgcacgccgtacagtttgcgggattcgtcctgcatggcggcaacgggcgcgccctcggtatgcgccagcacttcaaagccctccggcgcggtcttgacggccacgccatggctcatccacgtgttctgatcggcgggggagccgtcgagcagaccttccgacttgtcgatgaaggtctcggtcttgccatattcgccaagggcggccttgtcgacattcgcgcccaaggcataggccatggcctggaagccgtagcagatgcccagtacgggaacgccggcctcgaacagtttcttgtccacacgcggcgcgcccggttcgaacaccgaagccggaccaccggaaaggatgatggcctgcggatccttggccagcatctcgtcgaccggcatggaatgcggcacaagctccgaataaacattggcttcacgcacgcgacgtgcgatcagctgggcgtactgggctccgaaatcaacaacgagcacaggacctgcagccataacactctcccttttgatatgaggtatgaagaagcaacaatactaactgttctattgtggcgacgcgagcagacattggaaacgctgtgaacagaaagtgaacaaacctcacaattgcttactacgcatggttcaacacgccgcatgcaagtattgcaaaacgaacgtgaaaaaggtgtgaggatggcttgatatcgttgatattgagccgtttatcaatctttttgatagcatgtgaagtattcacaaatctcccgataaaagctctcattttctaacagaaacgacacacttgcgcacacagtcgcaaaaaaacagcaaaaagtcgcacctcgctcgtaatatgctcaagtgattgggaatgaatcgttccgcggaaccgcaaggttttgcgagattcaggaccgaatgaaaataaacaatcgcacaacacagtgcaggagtacaggagtacacatgacgagtcctgttattggcaccccttggaagaagctgaacgctccggtttccgaggaagctatcgaaggcgtggataagtactggcgtgcagccaactacctctccatcggccagatctatctgcgtagcaacccgctgatgaaggagcctttcacccgcgaagacgtcaagcaccgtctggtcggtcactggggcaccaccccgggcctgaacttcctcatcggccacatcaaccgtctcatcgctgatcaccagcagaacactgtgatcatcatgggcccgggccacggcggcccggctggtaccgctcagtcctacctggacggcacctacactgagaccttcccgaagatcaccaaggacgaagctggtctgcagaagttcttccgccagttctcctacccgggcggcattccgtcccactacgctccggagactccgggctccatccacgaaggtggcgagctgggttacgccctgtctcacgcctacggtgctgtgatgaacaacccgagcctgttcgttccggccatcgtcggcgacggcgaagctgagaccggcccgctggccaccggctggcagtccaacaagctcgtcaacccgcgcaccgatggtatcgtgctgccgatcctgcacctcaacggctacaagatcgccaacccgaccatcctgtcccgcatctccgacgaagagctccacgagttcttccacggcatgggctatgagccgtacgagttcgtcgctggcttcgacaacgaggatcacctgtcgatccaccgtcgtttcgccgagctgttcgagaccgtcttcgacgagatctgcgacatcaaggccgcagcccagaccgacgacatgactcgtccgttctacccgatgatcatcttccgcaccccgaagggctggacctgcccgaagttcatcgacggcaagaagaccgaaggctcctggcgttcccaccaggtcccgctggcttccgcccgcgataccgaggctcacttcgaagtcctcaagaactggctcgagtcctacaagccggaagaactgttcgacgagaacggtgccgtgaagccggaagtcaccgccttcatgccgaccggcgaactgcgcatcggtgccaacccgaatgccaacggtggtgtgatccgcgaagagctgaacctgccggccctcgaagactacgaggtcaaggaagtcgccgagtacggccacggctggggccagctcgaagccacccgtcgtctgggcgtctacactcgcgacatcatcaagaacaacccggactccttccgcatcttcggaccggacgagaccgcttccaaccgtctgcaggccgcttacgacgtcaccaacaagcagtgggacgccggctacctgtcttcccaggttgacgagcacatggctgtcaccggccaggtcactgagcagctctccgagcaccagatggaaggcttcctcgaggcctacctgctcaccggtcgtcacggcatctggagctcctacgagtccttcgtgcacgtgatcgactccatgctgaaccagcacgccaagtggctcgaggctaccgtccgcgagatcccgtggcgcaagccgatctcctccatgaacctgctcgtctcctcccacgtgtggcgtcaggatcacaacggcttctcccaccaggatccgggtgtcacctccgtcctgctgaacaagtgcttcaacaacgatcacgtgatcggcatctacttcccggtggattccaacatgctgctcgctgtggctgagaagtgctacaagtccaccaacatgatcaacgcgatcattgctggtaagcagccggccgctacctggctgaccctggacgaagctcgcgctgagctcgagaagggcgctgccgagtgggagtgggcttccaccgccaagtccaacgacgaagcccagatcgtgctcgcctccgctggcgacgttccggctcaggagatcatggctgctgccgacaagctcaacgagctcggcatcaagttcaaggtcgtcaacgttgtggatctggtcaagctgcagtccaccaaggagaacgatcaggctatctccgacgctgacttcgctgacctgttcaccgaagacaagccggtcctgttcgcttaccactcctacgctcgcgacgtgcgtggtctgatctacgatcgcccgaaccacgacaacttcaacgtccatggctacgaggagcagggctccaccaccaccccgtacgacatggttcgcgtgaacaacatcgaccgctacgagctcgttgccgaagctctgcgcatgatcgatgctgacaagtacgccgacaagatcaacgagctcgaagccttccgtcaggaagccttccagttcgcagtcgacaacggctacgatcacccggattacaccgattgggtctactccggcgtcaacaccaccaagcagggtgctgtctccgctaccgccgcaaccgctggcgataacgagtgagtctagcctctataggctgatcgcttgaagaaaaccccagaggattcgtcctctggggttttctgtttactcttcaccgtctgttcgcaacaccgtttcatgagatgcgtgtctgttaccgttcacgcattacaatggcacatggtgcgaaacagcgcagtcacacaccttaaaaacaacgaataggagcagacatcgtgagtctaaccagcgtcaccattatcagccctgaagcagcaaacggccgcaacgtcgtggcccttggcgtcaccaaggcattcgcagctgccaagaagacggccgtgttccgtccggcggtttgtcgcaaggaaaccttcaccgacgttcttcttgaagcaagcaactcggggctgagccgtgaacaatccgtcggtgtttgcccgaagcgtgcacgcaccgacaaggaaggttcccgggccgatatcgtggccgcctacacggaagccatcgaaaccgcccagcctgaagccgtggttgttgtcggaacggacaaatccgccatcaacgacccgtccatctttgcgttcaatgctgacgtagccgctgatcttaagtctgtcgtgcttcttgccgtatgcaccatcaaccgcactccggaacaggtcctgggcactgtcgaggcgtcgaagaccatcatcgagaatgcaggcagcaaggtcgccggcgtgttcatcaccggatgcaaagacgaacaggtggaacctctcaaggaggagttcgcagcttacgaggtgccggtgtggacgttacccgccgttgattttgacgaggaagacgccgtgaccaaagccacggaggcattcgaggcgaatgtcaacgccgaagagcttatctccgctgttgaggctccattcgaggcgccgaccacgccatacgcattccagtacagtctgctgggcaaggccaaggcagacaagagaaccatcgtgcttccggaaggaaccgaagaccgcatcatcaaagcggccgactatctgcttgagcgtgatatcgtcgatctgatcatcgtcggagacagggaaggcattctcgcccgcggcgaggagcttggactcaaattccttgaaaaggcgcagttccaggccaaggacgacgaggaagtgctcgctccgatggtcgccaagctgtgtgagctgcgcgccaagaagggcatgaccgaggaacaggctcgcaagcagctcgccgacgacagctacttcggtaccatgcttgtggtgctcggcaaggctgacggtctggtttccggatccatcaactccacggccaacaccgtacgcccggccctgcaggtcattaagaccaagccgggatcctccctcgtgtccggtgcgtttctcatgtgcttcaaggaccatgtcgcagtgttctccgattgcgccatcaacctgaacccgtccgctgagcagcttgcggaaatcgccatccagtccgccgaaacggcaaaggcgttcggcctcgatccgaaggtcggcatgctgtcgtattccacgctgggatccggcaagggaccggacgtcgatctcgtggaggaagcaaccgcactcgtgaaggagaaggctccgaacctcgcggtcgtcggttccatccagttcgacgcggcttggtcgccgaccgttgcagccaccaaggccaagggcaacgatgtggctggccatgtcaatgtgttcgtgttcccggatctgtgcgcgggcaacatcgggtacaaggccgtccagcgttcctccggcgcggtggccgtcggtccggtgctgcagggcctgaaccgaccggtcaacgacctgagccgaggcgcaaccgtgcaggacatcatcaacacggttgccctgaccgccatcgaagcccagtaaaacgctattttgtagcaagcaaagagtaatctaaagtttggaaagtcgcgcaagcggcacatcgattaacacatggaggatgcccacaatggcgaaaaccgtccttgtcatcaattccggttccagctctatcaagtatcagctggttgatcttgaaaccggtgaaggtattgcttccggcctggtcgagaagatcggcgagccggttgacggccactacaagcacgagttcaacggcgagaagcatgagctggaagagccgatccacgatcacgagcagggtctgaagcgcgtgctcggcttcttcaacgagttcggcccgaagctggacgaggccggcatcgtggctgttggtcaccgcgtggtgcagggtggttccatcttcccgaacccggctctggtcaccgacaagaccatcaaccaggtcaaggacctcgccgtgctcgcgccgctgcacaacggtccggaagccaagggtgctgaagtcatgcgcgcgctcctgccggacgtcccgcagatcttcgtgttcgattcctccttcttcttccagctgccgaaggccgcaagcacctacgcgctgaacaaggaaatcgccgaccagtaccacatccgccgttacggcgcccacggcacctcccacgagttcatctcctccgtggtgccgagcgtcatcggtaagccggctgaaggcctcaagcagatcgtgctgcatatcggcaacggcgcttccgcctccgccgaagtttccggcaagccggtcgagacctccatgggcctgactccgctcgaaggcctcatgatgggtggccgtaccggcgatatcgatccggccgtcgtcttccacctgatccgcaacgcccacatgaacgtggacgagctcgacgctctgttcaacaagcgttccggcatgatgggcatgaccggcttcggcgacctccgtgaggttcaccgtctggtcgccgaaggcaacgaggacgccaagctggctctcgacgtctacgtacaccgcatcgtcggctacatcggcaactacaccgctcagatgggcggcgtagacgtgatcaccttcaccgcaggcgtcggcgagaacgatgacgtggtccgcaagatggtgtgcgacaagctcgccccgttcggcgtcaagctggacgaagagaagaacgccacccgttccaaggaaccgcgcatcatctccaccccggattccaagatcaccatctgcgtcattccgaccaacgaggagctggcaatcgcccgcaagtccgcggccatcgcagaagcaggcgaagacacttacggcaacgtcttctccaagtgagcgaggagatcccgcagtcaaatgattgaagggaccatatgaagaggaccgtacgttccattggcatcaaatccaatgccaatggaacgtatggtcctttctttttcgaataatccttatgtttcaccgcttttaaggtttcgatcgccgaacgtttccaatcgtcccagacaatgactttccatatccgttcatggtccgcataatgggggaggggctggtagtacgatacgaaacgttgtgcctaacgcgcatacgtcgcatgttgagagaagcggttgattgttgtggtaagacgtcgttttgtcggtctgaatggcctcaagggcatcgccttgatcgcgatagtgttgtatcactgcgaccagggcactctgcggggcggattcctaggtgttgacatattcttcaccatttcaggttttctgattttctcgtcgttgctgaatcatattgattccggcaagggaataggtttcaaggaatactacctcaagcgtctgcacagaatatacccggcgctgattctgatgattcccgtcaccgtatcgttggcatggttcatcaaccaagacatgttggtgggcattaacaaccagatagtgacggctatgctgggttgttacaactggtatgccatcggcagtggcgccagctatttctcgcagatgaatccagacatgttccgtcatctgtggttcatgtcggtgctgatgcagttctatctgttggctcctttgctgatctacctgcttcgaaaaattctggtacgttgggtgccggtggcggtacttgccggacttgccgtgtgcagtgcgctttccatgggattgcagtatcacccgggaaccgatccaaccagagtgtatttcggttcggacacacatgccatgggactttggctaggtgccatgctggcatggctgctgatgatcatacggcgtggcaacggtcgtccggaagaaacggcgatcatggaacgcgctcgtctggtctggagcaagatcggccctgcggcggcttttgtggtattactgattctgttatggatgatgcagcacgttgagcagggtcctgctgccttctatggagggattttcgcggcttcgctactttcagtggttctggtcgccggttccattcctttcggatcttggatgcaggatctgctggtgttcaaaccatttgatgtggccggccgatattcatacggcatttacctgtggcattggcctttatggttgttcaccaaggcgatgttcccccagtggggtgctcggcatctgggatggatgctgctaatcacactcgctcttaccgcatgttgtaccgccatgtcgtggaagttggtagaacagcccgtcgcccgtggcggatttatcgccatgattcgcccgctgccagaaaacggaatgtgggatgtaaccagatgctggattacgatcgccgtggtattgagtacatgcttgatgtccggatacgcggtagccaacgcaccaaagcagaccagtgtggaacgcgcgttggaagagaatgcgaaaatgctgaaagagcagcagggcatgcacctcgacttcgataggaagcatccgccagcgcccaagaaacccgcatacaccatgcctgacgggcagcagatggtcgcattcggtgactcggtgatgcttgcctccagtaaaggtttgcaatccgtttttcccggaatcactgttgatgcggaaacctcacgttcgatgaccaaagcattgggacttatagaccaagccaaaagccagccggaaggattgcgccaatgggtgctggtcggcttggctacgaattcagcggtgaccgatggccaactcaatgacatactgaacgacattggaccggatcatgtgcttgtgctgattaatgcgcatgcccccgtgtcttgggtccccggaacgaacgacgcgttgagcaacttcgcggccgcccattccgacaacgttgttctcgttgactgggacgctacgatttcggcgcatcctgatgagcttgccggagatggtattcaccctggcatgtccaatacgctgtacgcccaggctgtcaaggatgcgattgcgaactggatcaagcaagggcactgaaacatccttcttgcgaatcgcggcaaagcagttttgcgatgaatatgaggaatccccctgactcgtttgagcagggggattcctcataaccttttaggatctgaacggactcagtcttcctgatgctgcggagccgacagaaaatgctcttcactcggcagcagagcattcaacagcacggccacaacgaacgccacggcgatgcaattggatgcgaagatggactggaacagcggcgggaagttgacgaaaatgtcgccgacctgcgtgaaaccgataccgatggtgagactcaacgccgcaatggtgatgttgcgctgcgtatagccggcctcggaaatcatctggaagccagacaggatgatgttaccgaacatcatgatggtgcagccaccaagcacggcctgcggcagggaattgaacacttccgccacggcaggcacgaagctggctatcaccagaatcagaccaccggaaagaatcaccttacggttgacgaccttggtcatggcgaccaagccgatattctgtgcgaacgacgtcaacggcaagcagccgaacaggccggagacggaggagatgagaccgtcgcctgcaatggcgcccgcagtctccttatcggtaggctgacggtcgagaccaaccttggtgagcgcagcggtatcacccagcacctcaacggaagacacgacatacagcagggcgaaggagatgatcgcgcccggatcgaattcaagctggaacggcatgaaatgcggcacggacacaacctgcagattcgcgaaaccagagaaatcgaccttgcccatgaaaatcgcgacaacatagccgacaaccaagccgaacagcacggaaagctgcttggcagtacccttcatcagcagctggaacgccaagcaggcgaccagcgaaatcagaccgagcgtgagattctgccagcttccgaaatcctcagcgccggaaccgccgccgaaactggtggcaccaacggaaagcagtgagaaaccaatcgacgtaaccacaatcgcggatacgatcggcggcacgaagcgacgccaatacttggccgtcaaaccaagcacaacctccaacaggccaccaagcacaaccgcgccggcgaccgcgccgtagccttggttctgggcgatcgacatggcagcagccacataggtgaaggaaatgccagtgaccatcggcaggcgggagccgatcagccacacgccatacagctgaaggcaggtgcccagacctgccaccagcagaccggcctgaataatcgtggcagactgctcggcactcatgttggcggcggaagccaccaagaaaatcggagccagattggccacgaacatcgccatgacatgctgcaggccgaacgggatgcccttccagaacgaaacaggcgcgtccaagctgctaagcgcttcaaaggaaacgcccttcttctcgttcgtgttgtctttcttcttctcttctctcacaatgaatcctctctcattcatgctgcgatgagtaacaggttgtaatggtttctgatgcgcgcccgtgagatgcgacgatcaggagcggaattcgatggtaccggtttccggatccatcgactccacgattgccagggaatcaacgtcgtatcccgctgcgcgcagctcatcgccgccgccctggaaacccttctccaccgcgatgccgatgccctcgaccgtcgctccggcatcatggcacagattgatcaggcccttcagagccttgccgttggccaggaagtcatcaagcaacagcacatggtcgccctcgttgagatacctcttggacacgatgacggggaattccttctgcttggtgaaggagtagacggtggtggtgtactggtcgccatcgagattgatggactgcgccttcttggcgaacaccacaggcgcattgccgaaatgacgcgcggcaacacaggcgataccaatgccggaagcttcaatggtcaggatcttgttgatggttttaccggcaaaatgttccgcccaagcggcacccatgtggtcgaacaattcgacatcgcactggtggttgaggaaagcatccactttcagcacattacctggcttgacggtaccctgcaggcgaatgcgctcttcgagctccttcatgaatccccttagattgttggccgcataaggcggcgttgatgttgacatacggtgaaccgcatataaacgttcagcatacgcgcgtcaattgaccatgcgagtgttgcgctgacctgcatgtgtgatagatatgaatttcgcagtaatcgacttcgaatcttcatggaaagaggaaccggtggagcagaatatgggaccagtcctgtgcgatccgcaaagtctgatcaaggacctcaatccgcagcaaatggaagcggtgaagtactacggacaagccctgctcatcggagctggtgccggatccggtaagacccgcgtgctcaccagacgcatcgcatggctgctggcacatggtttttgggcgagcagcattctcgccatcacctttacgaacaaggccgcggccgaaatgcgcgaacgccttgcgtccctcgtagggcctgaagccgaacacatgtggatctccactttccattccgcgtgcgtgcgcatcctccgacgtgacggcaaggaaatcggtcttacctcaggattttccatttatgacacggctgattgcgaacgcttggtcaagctcatcagcggcgatttgaacatcgatacgaagcggtatacgccgcgcatgctattgggcaagatctcggattgcaagaattcgttgatttcatggcaggaccagctgaaaagcgtgaactgcgactacaagccaggccagcgcggatatcaggtttcggccggcgacgtcgacgagctggtcgccgtgatgtatgcggagtaccagtaccgtctggccatggcgaatgccgtggattttgacgatctgatcatgcgcaccgtcgaattgttccagcgttgcccacaggtgagcgaatattaccggcataagttccgttatattttcgtggacgagtatcaggacaccaaccatgcgcaatatgtgctcgtacgtgagctttccggcattgattcgggagaacagcccgatccacatatgcgaggagcaggccgtgtcggaccgtcttggattacggtggtgggcgattccgaccagtcgatttatgcgttccgaggcgcggatattcgtaatattcaggatttcgagcaggatttccctaacgcgaaaaccatcatgctcgaacagaattatcgttcgacgcagaccattctcgacgcagccaatgcggtgatcgcaagaaatgaaaatcgtaagccgaaaaaactgtggacggcacttggcgaaggcgacaaaatcgtcggatacgcggccgacaacgcgcaacaggaagccggatggatcgccaacgaaatcgcacgaatccacaacgaggaaggcgtggcgtatcgcgacatcgccatcatgtatcgagccaacgcgcaatcacgctcgctcgaagaggccatgatcaatgccaacctgccgtatcagctcgtcggcggcaccaaattctacgaacgcagggaaatcaaggatgcgctcgcgtatttgcaggccatcgtgaatcctgcggacaatgtgaacgttcgacgtatcctcaatgtgccgaagcgcggactgggcgttcgtgcggaaggactcgttgcctcgtatgcggatgcccatggcaccacttttttcgaagcgattgaacatatggaacagatcgaaggcatgtccacgcgcacgacgaaaccgttgagtgcgttccgagacatgatgcatgagcttgcggcttttgcgaaggaccatgacacgaagccatccgaagtggttgccgaagtgcttgccaagagtgggattttggaagagctgcagcgctccgaggatccgcaggacgcttcccgcgtcgataatctttcccagctgcaatcagtggcggcggaattcgagcagaacacgccagacgccacattggcgggatttttggaaaccaccgcgttggtggccgattccgaccaattgccaggggagaacgaagattccggcaaggtgacgatgatgaccctgcataccgcaaagggtctggaatacccgtatgtgttcctgaccggcatggagcaaggcacattcccacaccagcgtgccatggaagacaccagcgaactggcagaggagcgccgtctcgcctacgtgggcatcactcgcgcgaagcgacgcctgtatgtgacacgcgcggccgtacgcgcgcaatgggggcaagccagcgacatgatgcccagtcagttcctcgatgagattccagacgaactgattgattggaaaagacgcgaagccggcgtcgaacgcatgcgtgccagctggcaggatgacgacgacgagttcggcggctgggacgatgatgacgatttcggatcgatgtcattcggcggttcctcgtatggaaagtcggattatggttcctcatacggttccggctcgcggtggtctcgttcctcatacggatcgtcttcatatggggcagggcgctcgcagtacggcggcccggctacgcagggctcatcatcctcgtatggttccacatctcggcgctcgtgcggaggatcgggaaccggttcctcatacggctcgtatggttcgtatggctccggcaagtcaggagggaaatcgggcaaggtcaccacgcgacgtgtcaagccgaaaaacaagcctgtggatttaaccaaatcctcatccgcaagcccggccggtagccataatgatctgaacattgcagacgtgcatgtcggcgacaagcttacgcatgatcatttcgggttgggtacggtcattgaaacgcaggacaagggcatgaattcggtcattaccgttgattttggcaatggtgaggtcaagcgtctgctgttgcgtatggcacccattgaaatgctatgacggagatgaagaacggatgaaatctcctctgtagcacgaaaaggaggaaaaaacaagactttctttttcaaagagaccctgcaataatcggcggtgtttgtctttttttgagaggaagctatgaataagaaactgtacgcaggcatttcgcagatcgtgctcggcatcttgatcgccatcgcgccgcagaccttcgctcacgtatgcgcggtcaaagaaacgccgatggcatgtcattacacggctcaggccgcgctcggcatcggcatcgtgatcgtggcgcttggcattgtcggcctgttcgtatccgatcagacccgcgccggtcttgacctcgccaatgcggtgctcggcgtgctgaccatcgccgtgccgaccgtgctcatcggcgtgtgcaagggtgccatgatgcgctgccatatggtcaccttgccgacgctgatcgtgctcggcgtgctgctggctgtacttgcggcaatcgcggcatatctcgatctcaagccggcgaagcgcgcctgacccaatatgacgcaacacatcacccttggcgggttgcccctggtcaatctcaaacgcaaaccgtttcgtaccgcggcgctcaccatcgttgtcgccatgcttaccgtggccttctatggtggttcactgctgtccatgaaccttgaagccggcttgaacagcatgcaggaacgtatgggcgccgatctcatggtcacgccgcaaaacaccaaaaacgaagccgaagcgttgctgaccaacggatcggcaagcacgttctacttcaccaacgagatcaccgacgaagtggcaaaaaccgacggcatcgacgaaatcacggaacaaacatatatctcatcgttggccgccgcatgctgcgacgagaaagtccagatcatcggattcaaccccgataccgacttcgtgatcaccccttggatcgcatcgcagttcgacggcacgctccagcgcggccagatcgttgcaggagccagcatcagcgtgtcgggcaacaacacggtcaaactctatgggcacgaattccccgtggcggcgcaactcgccaataccggcacgtcgctcgacaattccgtgttcgtgaacatgcagaccgttcccgacgtggtcggatattccgccaaggtggggcatgccgccattccggaagaatatgccgacaaagccgtttccgccgtgctcatcaaggtcaaggacggttactccgcccagcaggtcgcttcgaacatcaccaaaacaacaggaatcaaaagcctcggatacgtgtatccggggggcatcacagccacaacgaaatccaatctgaacgtgatcattcgctacgtgacccttttcgtcgcggtgttctgggtcatggggctgatcgtgctgcttgctgtgttctcgtccgccatgaacgaacgcaaacgtgaattcgccgcgtatcgcattcttggtgccaatcgttccactttggtcggcatcatcgtgaaggaatcggccatgatcggagctttgggcggtgtgataggcattgcggtcgcgtcgctggcgattttcccgttcagcacgcttatcggacggcagctgcagttgccgtatctgcaaaccaacatgtggaatgtgttggcattgatcgcagtgagtttcgtgttcgcggtgcttaccggactgctcgcctccgtgacgacggcggtgaaactttccgctcccgaaacctatctgactttgagagaaggtgaatgatggcggaaaacacggttctcgaagtacaagagctcactcgcgagttcacccgtcgcggcaaaccgttcgcagccgtggaccatgtggatttcaggctgggccaaggcgagttcgtggcgatcgtcggccgttcgggcaatggcaaaagcacattgttgaatctcatcaccggactgctgaaacccacatcgggctctatcgacttggacggcaatgacgtgacgcggttgaacgacaaacaaatgtcagtcgtacgcaatcggatcgtcggattcgtcacgcaaagccagacattgctgccgaatctcacggcactcgacaatgtgattcttccttccgtgctgtgcaacggcaaaacggcgcagcgcgatgttgagatacctgcggattcgtctgatgcgaaatcagtggaagaaaccgtatccgacgcatcttccgaacagacggttgacgacggacttccggacgtcatcgcggcggctccggtatcgaaaacacacaacgatcccgttcgggaccatgccatggaacgtgcgcacgcattgctgcgccgactgcaggtcgacgatttggcggaatgctacccgaaagagctttccggcggcgaaatgagacgcgtcagcatagcgcgagctctgatgaatggtccgaaacttctgatagcggacgaacccaccggagatctggatgccgaaagcactgccatcgtcatgcggctgctgcaggaagtggcgcacgacggcaccgcagtgttgatggtcacccatgatccggatgccttgacgtatgtggatcgaatctatcgcatggacaggggagtgctggctgaagcatagcggcgccatgatggcatgacatgccgaagagggcgaaacgacgagctcgtcccgccctcatgtgtattattaacgattggtgtgcgcccgcaagggagcataccgtctggagtcttagcccatcagtgggtcggcgaccgatacgagctgtttacggcacgtgttcaagtcgttcgtgcgcatgcacgaagaagcactggagaggctggctcagcgcatatcggaaaccggtgtgcgctccgttcagacaacgacagaacaaacaaaggattaaaccaatgacgaacgttcagcgttctcgccgtcaggtgcgcctttcccgcgccctcggcatcgctctgacccctaaggctcagcgcatcttcgaaaagcgtccgtacgctccgggtgagcacggccgcacccgccgtcgcactgagtccgattacgcagtgcgtctgcgcgaaaagcagcgtcttcgcgctcagtatggcatctctgagaagcagcttcgcgccgcttacgagaagggcacccacaccgccggccagaccggtaacgccatgctgatcgatctcgagacccgtctcgacgccctggtcctgcgtgcaggcttcgcccgcaccaccgctcaggcacgtcagttcgtggttcaccgccacatcctcgttgacggcaacatcgtcgaccgcccgtcctatcgcgtcaagcctggccagaccattcaggtcaaggccaagagccagaccatggttccgttccagattgcggccgaaggcactcaccgcgatgtgctgccgccggttccgggctatctggacgtcaacctgccttccctgaaggccaccctgactcgcaagcctgaagccgaggaaatcccggtgcaggtcaacatccagtacgtggtcgaattctacgcccgctgatctggatctacatactgtaagagcatacagtataaggacatacagcaagagcctcgcaatcgtcaggattgcgaggctcttcgctatctcaagcgcatgtgcggcctttttaagcaacgggaagccttcagtcgccgatgatgccgcctactatgccgctcacaatcgtcataacaagtgagccaagcacagaccatgcgaatccgtcaatagtgacgcccacagagaaaaacgacagcgccaaccatgacgcaagctgcatgaacagccaattgatcaccagtgcgaccagtccgaacgaaataatcgagaacggcaacgctatgacatggataatcggctttatggaagcattgataagcgccatgaacaaggcgaacgccgcgatgccaagcacagggggctcgccaatggcgtgcatgccgggcagaaccgcaaccataacgcccgccgcgacggtaagaattagccaacgtgaaataaaatgacccataacaacatcgtatagcacggatttgctcaaaccgtgagggtagcatggaacccatgttgcttcatcttcatcttgtccgacacgggcagacgtttttcaaccgatataacaggttgcagggctggtctaattctccattgacggaatctggcatcgccgacgcagacaaagccgcaaacaaactgaaggagttcgattttgccgcggcatattgctccgacaccacgcgtgcgcaaatgacagcccagcgcatcctcgacgtgaatgaggccgcaggacacatccgcccccaactggtcagtgacatgcatttccgcgaacagttctacggctatttcgaaggccaggatatgggcgtggcgtggaccgccgcgggagggccgcacggtgcgaagaactacaacgacatcgtcgcaaagttcggtcttggtgcgacccgcgacttccttaaggaagcggatccattccacgatgccgagtccgacgtggaatattggtcgagagtcgaggagggattcgcgctgatcgcttcgaatcctgcgctgagggacagtgatgacgtgttgcagatttcccacggcaacacgctgctgagccttatgcaccgtttcgcgccggaaggctatgacctcagcgaacgccctgcgaacggatcggtcaccacgctcgatttcgacaccagtaagcctatcgctgaagcggtaaccgtcgtatcgtataaccagtgaccggcggacgaaacttgccttaggtctgggctttttactactgttatgcgcgtgttgtgttcgcgggcaaccgtgggactgaaaagaggtacaagatgggtgttggagaaatcgccggtctgattgcggcaatcgctttcgcgattcttgccggtttcatgatctacccgttgattcgtctcggcaaactgttcgaccagctcgccgagacagtcaaagaaacgggagatcatgcgattcctgcgcttgatgagagtgtgaccacggtgcagcaggtcaacaagtcgctggaagacgtcaacaagatttccgcagcggcttccacaaccgccaataatgtcagcgccctgaccgatctgtatggatccttcttgggcaagccggttatcaaggttgcttccgctgcatatgccctgaaaaccaccgcgcagtccttcatgaacaagaagaacgtcaacagcaataacaagggggagtgatgttcaagcgtctcttctggatctccattggtgtgggcatcggtgcggtggcagtgaccaaagcacaggcgtacgtcaaggccaacacccctgatgcggctcgacaatttctgttcgggccggatcaagatcatgtcgccgtgcgcacccttgaaggtttgttcaatgagttcaacgaaacgcgtcgagcccgcgaggctgaacttaataccaaatacgcggataagatcagctgatcttattcccgtaacgtacgttcggacaacaatcacgaattcgtttgaaaggcaccaggcctttcagcaaaaaaggagcttaatctcatatgcgcacttctgaaatcgcgaagcgctatcttgattatttcgaaaagcacggccatcttatcgtgccttcggcatcgctgatctctccaaacccgaccaccctgttcaccatcgcaggcatggtcccgttcatcccgtacctcatgggcgagcagactccgccgaagagccgcatggcatccaatcagaagtgcgtgcgtaccttggatatcgacgaggtcggcaaaaccacccgtcacggcacgttcttccagatgctgggcaatttctcctttggtgattacttcaaggaagaagccatccactatgcgtatgagttgctgaccaccccgcaagacaagggcggctacggcttcgatccggagaagctgtggatgaccaccttcaccgacgacgaggaggcccgttcaatgtggaagaacgagggcgttgaccccgaacacatccagatcatgggcatggaggacaacttctggaccaccggcggccctggccctggcggtccgtgctccgagatctacgtggatcgcggacctgaatacggtgtggaaggcggcccgatcgccgatgagaaccgttacatcgaaatctgggatctcgtgttcgaaaactacgaggtcgacaacgtcaagtccaagaccgacctgcacatcgttggcgagctcgagaacaagaacatcgataccggtgccggcttggagcgtcttgcctatctgatgcagggtaagcagaacatctatgagaccgacgaggtcttcccggtcatcgaagccgcccagaagctgtccggccgcacgtatggcgatgacgaagccatggatgtgcgtttccgcatcgtggctgaccatgtgcgttccgcattgatgatcatgtccgatggcgtacgtccgtccaacaacggtcgcggctacgtgctgcgccgactgcttcgccgcacagtcaaggccatgcgcgagctcggcgtgaccgatccggtcatgccgaccctgctgccgacctccaaggcagctatggagccgagctatccggaactcaacgacaccttccacgatgtgtccgaagccgcatatggtgaagaggacgcgttccgtcgcacgctggaatccggcaccgagattttcgacctcgctgtggccaaggccaaggaatccggatccgacgccgtttccggcgaagatgcgttcaagctgcacgacacctacggcttcccgattgagatcaccctcgaaatggccgccgatcagggcgtcaaggtcgatgaggcgaagttccgcgagctcatggccgagcagaagagccgtgcccgtgcagatgccctgaagaagcgtcacaatgtggatctgtcggtctatgacgatttcaagaagacgctggtccagcccatcgacttccttggttacaccgacatgtccgcccgcgccaaggtgctgggcatcatgcaggaaggcaagggctccgtccccgcagtcaccggtccggccaccatcgaagtcattctcgaccgcactccgttctatgcgcaggccggtggccagctcgccgatcagggcgagatcctttccgacgatggtgctgtgctcgaagtcgacgatgtgcagaagccgatcaaggacctcatcgtgcaccagtgccgcctgaccgaaggcacgttggttgtcggcgccgaagtcaacgccaacatcgaccttgaccgacgcggtgccatcgcccgcgcgcataccgcgacccacatggtgcacaaggcgctgcgtgaggagcttggcccgcaggccacccagcgcggctctgaagacgcgccgaaccgtttgcgtttcgacttccagtggtccagcgccccgagcaaggatgcgatgaactccgtcgaggcgcgtgtcaacgagaagctgcgcgaaaatcttgccgtcaccacgcaggagatgaagttcgacgacgccatcgccttgggtgccatgcacctgttcggcgagaagtatggcgacgtcgtgcgcgtggtctccatcggcgaagatggatggagccgtgagctttgtggtggtacccatatcgaccatgtgggcaagatcggtgccatcaacatcatgtccgaagcctccatcggctccggcgtgcgtcgtgtcgatgcggttgtgggcgaaagcgcttatgagttcaacgctcgcgagcatgcgctggtctcacagctttccgacatggtcaatgcccgtccggacgagcttgctgaccgtgtgaacgcactgcttgccaggctcaaggaatccgaccgtcgtcttgcgaccatgtacgaatcccagcttgcggcttccgtgcctgctttggtttccgaaaccaaggcatcccaggctccggtcaaggtggcagcgaagaacgtcgagcacttcggctctttcgacgcgctgcgcaagaccgtgctggatgtgcgcggacagcttggtgaggaattcccggttgtggtggctctcgccggtgtgaacgaggaaggcaagcctatggttgccgtggccactaacgaggctgcacgcaagcagggtatcaaggccggcgatttggttcgtggcgcttccaagatccttggcggtggtggcggcggcaagccggacttcgcccagggtggcggcgcggatgccaccaagatcaatgaggcgcttgaggctttggccaatcaggccatgaagggctgaaccaccaagcatggtttggcttggcattgatttaggtgatgccagggttggactcgcactgtctgatcctggcatcactcttgcacaccccgcaggcaatattcaggtctacggggattcgttccgtgcattggacgaggtcgtggacgtcatcgaagacgaatcggtcgaccatgtggtagtcggattgccgttgctactaagcggagaagaaggcaaaagcgcgaaaaaagcacggcgatggactgttaatcttgagaagagactgcgtgtcgcagtagatgatgagaactatgcgctaaaggaagtgccgtccatcgaattggtggatgagcgtctaactacggtgactgcacatcatcagctattcgatgcgcaggtcggtggacgaaagcaccgtccgatggtcgaccagcagtctgcagtggtgatattgcagacggccatcgaccgaagagagagaccagaggagagaggcctgtgactgataatctcgacgattttttctccgataacgcgcaatgggtgaattcgtcggatgatgcatccttcgtttcggcaatgccgccgcaaccaccgaaatcacgtaaggacatgcgtcgtcaccgtgagcagaagcgtcgtcgccgctatatcaccattatcgccgctctggtggtgatcgtgctgatcggtgtcggcggattcttcggcgtgcgcgcgctgaaacattggaaggccgtgaacgaagcgaattctcaaagccaaatcgaggattacacgggcccaggcgataaaggcgtgacgtttgtcgtggaatccgggcagggagccgcggaaatcgcggacaaccttgttaaagctaaaatcgtcaaatccgcagccgccttcacttccgcagtaagcggagctggcgccacgttgtatccgggatcatacgcattgaggacgcatatgagggcgtccgatgtggtcaaggtgctttctgaccaaagccaggccggcggttttgccgaagtgcgtgcgggtgaacgtgtgtcggacgtcatcgaaaatgcggcgagtgtgtccggcttggatgtttcacagttccaagccgtgatggacggtggcggtgctggaatccttcctgacgaggccggcggcaaattcgagggatggcttgaaccaggcagctacaatgtgcaaaacaagtcagcggaagacatcatcaaggaaatggtcgacgcgcgagtgagcaaactcgattccttgggcgtacctacaggcagcgaacgtgagcgcatcctgaatatcgcatccatcgcggaggcggaagtcggcagcgaaaaatactacggccaggtggcaagagtgattctcaaccgtcttgacgccgatatggctctcggcatggataccacggtcgcctacggtcttggtatttccgcaagccagttgaccgatgaccagttgggcgatgacagcaacgcgtacaacaccagaatccacaagggactgccgcccacgccaatcagcaaccctggagatggcgcgatcacagcagccgtcaatcctccggacggcaagtggctgtactttgtcaccacaaacctgcagaccggcgaaacgaaattcgtggaaaccgaagatgagttctggcagattcgcgacgagtacaagaacaacaacgagaacgcgaactgatctcagaataaaacgccaatcgcaatgcctatcgccccagctgccacaagcgctggggcgaacggcgttttaccggcatatgcggtatgcttctgcggatcgaaacgtgtccacaaaacgagccataacaagccgaccacaccaatcgcaagccaccaaaacaccacggcgaacagaccgaacatgccgactgccaatcccatcagcaaggtggcggtgacatcgccaaaacccaatgaaccaggtttcaccaaagcgagcgcgcattgcagtacggccgacagtacggcgaagagtattgcctgcaatgccaggtacagagtgttgatggaaagcgcgtatatgaggtttacgatgatttgcgctgtgcatccggtggcgatccaggcgcgtggaatgcggcgtgaacggatgtcttcaacgctgatggccagtccacaaagcagacttggcaggcaaatcatataccacataccgttaagatagtccactagttgcattcgtgagaaaaggagttggcatgttgcgttggcagacagcaggcgagtcgcatggtgaggcgcttgtcgccatgattgagggattgcccgcgggcgttcatatcaccacggagggtattgttggcgcgttggcgcgtcgtcgtcttgggtatggtcgtggcgcgcgtatgaagttcgagcaggacaaggttcgtatgctgactggtgtgcgttttggtgagacgattggttctccggtggccatcgagatcgccaacaccgagtggccgaagtggactgaggtgatgagtgcggatccgcttgatcatgagcttgctcgtgagggccgcaatgccccgttgtctcgcccgcgtccggggcatgcggatttgactggcatgcgtaagtatggttttgatgatgctcgtccggtgttggagcgttcttccgcgcgtgagacggcttcgcgtgtggcgttgggtgaggttgccaagcagttcttggagcaggcgttcggtattcgtaccgtttcgcatgtgctttccattggtggcgcaggtattaccgatccgcagcaggccacgcttcccaagccggagaatcttgaggcgttggacgcttctccggtgcgcactcttgacaagaatgcggaagagcggatgattgcccgtattgatgaggcgaaggagaacgccgatacgttgggcggtgtgatcgaggttgtggtgtacggcgttcccgcaggcgtgggcacgtatgttgaatcggatcgtcgtcttgatgctgctcttgccagtgcggtgatgggtattcaggccatcaagggcgtggagatcggtgatggtttccttgaggccatgcgtccgggttctcaggctcatgacgaaatggtggtgggcgatgacggccgtattgcgcgtctaagcaaccgtgcgggtggtatcgagggtggcatgtcgaatgggcagccgatcgtcgtacgtgcggcgatgaagccgattccttccattccgaaggcgttgcgtaccgtcgatgtgaccacgggcgagccggcgcaggccattaaccagcgttccgacaatactgcggttccggcggcggctgttgttgccgaggcgatggtgcgtttgaccatcgcgcagtatgtgcttgagaagtttggcggcgattgcgttgccgaaaccaagcgtaacgccgagcagtacgttgcctcatggcctgagcatatgaggtgattcgtctatgagtggtatgcgtaggcctgtcgccgtgatcatcggcatgatgggggcgggcaagactcgtgtcggcaaggaagtggcgcagatgatgaatctgccgttcgccgatgcggacaatgagattgagcatgatgccggaatgcggattcccgagtacttcgaaaagtatggggaaccggaattccggaggctggaaagcgacgtcgtgcttgatatgctcgaggatttcgacggtatcttttccttgggcgggggagcgccgatgacgccttccattcaggaaggattggcgcagtatatcgcggacggcggcaaggtcgtgtatcttatggccgatcctgaggaagccatggagcgggcaaatcgcggtggaggccgtccgatgcttaatggcgatgccaatgagcgttggaagaagctctacaaggaacgtgacccggtgttcaggagcgtggcgaacgtgcatgtgggcacgcgtggccagtctccccaagccgcggcgagaaagctgatggaaatgattgatcaacgtatagtccatgtcaccggttccaccatcgaaccatacgatgttcgtatcggagagggtgtgatgggccagcttgcgcaggtgttgggaagcaagcctgccaaagtggcgcttatccacacccagccggtgcagcgtcattcggaccgtgcgcgtactttgttgcgtcaggcgggctatgatgcgtacgatattgtgattcccgacgcggaggccggcaagaccattgaagtggccaatggtatctggcagcgtttgggggatgagggtttcactcgttctgacgcgatcgtcggccttggtggtggcgcggcaaccgatttggcggggtttgtggctgccacatggatgcgtggcattcgctacgtgaactgcccgacgtcgttgctggccatggttgacgcttcgaccggcggtaaaaccggcatcaatacccctcaggggaagaacctggtcggctctttctatacgcctgccggagtgcttgccgatctgaaatcgcttgcgtcactgccgaacgacatcttcatcgaaggattgggcgaggtcgccaagtccggtttcatcatggacccggagattctgcagatcctcgaggaccatgccggtgaattgcgtgccttcgacgggtcgacgttcttggattccggcctgaaggatgtggtcgcggagctgatcgaacataccgtgagcgtgaaggcctaccatgtgtccgccgaccttaaagaggcgggattgcgcgaattcctcaactatgggcatacgctcggtcatgccatcgagaagcttgagcatttccgctggcgtcatggtaatgcggtggcggtcggttgcgtgtatgcggccgaactgtcgcatcttctggggtacatcgatcaggatctcgtggactatcatcgttcgttgttgggatctctggggctgcctacgtcctggaacaatggcacatgggatgatgtgctcgcattgatgcaccgggataagaaggctcgcggcaataagcttcgtttcgtggtgcttgagggcgtcggccatccgattcatcttgaggatccgcctgcggacgccgttgaagaggcgttccgtcgtattcagcagtaaacaaggtagggaagtggaatatgactaaagtagtggtcgtcaatgggccgaatcttggccgtcttggcgtgcgtcagcctgacgtgtatggcaagcaggatcttgaaaccctgcgtaccctgtgcgcgcagtggggcagcgagcttggtcttgacgtggaagtgcgtcaaagcgatgacgaagccgagatgatcggctggatgcaccaggccgccgacgagaagaccccggtcgtgatgaatccggcggctttcacccattactcctacggtctggccgatgccgcgcatatggtgatcgatgagggattgccgctgatggaggttcacatctccaatccatccgcacgcgacgaatttcgcaagcgttccgtgatctcgccagtagcgacgggcactatcaccggtatggggttctatggctacaagctggcgttggatgcggtggcgcatctgttggaatcgaagtgatgattttccgatttccccttgagatagtctcggaggaactatgaatgccggatgctcttgatgggcatccggtttttacatagcattgcattcgtttgcagaaaaagctgcaacaatcgcaaatatgattgccgttttgcgcaacacaatgaattgttgctgaaagcattttctttcgcttgtccttcttttccgtatattgcaatcggtcacgctgtttcattgcgatgcgcagcatctactgtacgatgaaccccgatctagggtgcaaacgtatgcacattcatcgcagagtgtgtcttagatgatccgcaggtaacgcggatgaccatggcgcatacgttgtcgaagggcggaacctgccatgggggccggaattcgatctcaacgatgagaacggagaacaatggtcgttcagcgaatgaatcggccggctagccgtgcggtggccataggcgtcgccgccgccatggcgtgcgccaccttggtggcggtaccgcatatggctcaggctcagcccgaggcgcaaacgaatgcgaagaaagacgtgcaggtcatcgccttccagcagacatggaacacggtcgccaaggaatgcacgagcacatacggtccggaaggcgtggcatacgtcgaggtgtcgccgccgcaggaatccatccaaggcacgcaatggtggacgtcctaccagccggtaagctacaagctcgattccaagctcggcacggaagccgaattcaaaaacatgatcaagcagtgcaatgccgtcggcgttgacatcatcgccgacgttgtgctgaaccagaccaccggtgccgacgtggccgacggcaagcagaccggcgtcgcaggaaccgaatacaacggttcgaccggcgactacccgggatttgccaccgaacagtatccggaaggcatcacggcctccgacttccacagctgctccaagaacatctccaactacgccaaccagcaggaagtccaggaatgccgcctgagctccatgtgggacttcgactccgagagcgaaaaggtccaggatattcaatctgactatcttgccgccctgtggaatgctggtgttcgcggcttccgtatggatgccgtcaagcacatccacacggacagcatgagggccatcaaggagaagttcgcaaagaagatcggcgtgaatgccgacagcatctactggatccaggaggtcatcgggaactcctccgaagccgcgggcatccagccgagcaactacgtgcaaaacggcacggtgaccgaattcggcttcaagtccgaaatgaaccagaccttcaaagacaagatcgcaaacctcaagggacttaatgagcggttgagcaaggatctcgcctccgaagacgccaacgtgttcgtcaccaactgggacaccgcgcgcaacgagggcgccctgacctacaaggacggtgccaagtatcagctggccaacgcattcatgcttgcctacgactacggcacgccgcgtctgctttccgactacaagtgggatgagaacgacaacggcgcaccgggagccaccgccacatccgttccggacgtgaatatggacgaggtctgttccaccaacagctccgactggaactgcgagcagcgctggacctccacccgaggcatgatcgccttccgcaactacgtcaacggcaccaaggtcgccgactggcaggatgacggcggcgacaacatcgccttctcccgcggggataagggcttcatcgccatcaacaacggcaagaccgacaaggacgcctcctacacgacatcgctcgccgacggcgaatactgcaacgtgtacgccaccatggactgctcccagactgtaagcgtcaagaacggcaaggtcgagaccacggtaccggcgcattccgccatcgcactgtatgcaggcgccaccaaggacagccacccggcatccagcgtggccaacgacccgtccgatcctgacgtgaaccaggaaggggacgagaccctgcccgacgacagaagcgtcaccatctactacaagcccgccgattccagctggaagagcccgaaggtccactacggtcttggcgatgactggaaccagccggaagccgacatgaccctcgacgagcaggggtactatcgcgccaccatcgacaccaggggcaagaagatcgacttcgtgtttcacgataccggcaccgaccagtgggagaacccgaagggcggcggcaactaccacgccaacgcgggcatcacgcacgtgggtgtggccgatcaggccgcgaccgtgggtaatccggaatccgtcaacggccagacccgactcgtcgtgcactacaagccagccagcgattccgataatcgcggcgtgtacgtgtggggcacagacgctggcggctcgagcctctcggcagtcaaccatcccttcaccggagctgactggtggggcaaggtggctacgttgaccttcggcggcaagtttgacaagttcggcttcatcgtcaccaccgcagactggaacaagtacggtggcgaccgtagcgccacggtgaacgccgacggcacagccgaagtgtggatcgacggcaccaaatatgaggatcaaggcgaatcgaccaccgtcgaaaccctcgactccgctccgagcgactacgaatgcaaggccaacaccgttaccgtgaaggtccactacaaccgtgatgacggcctgtactacaacgccgaagacacctcggtcaccgttccccagtgggacatctggacctgggcttccaattggaacggcggagccgccaccttcaccacccacgatgactggggcgaggtcgcggaatactccttcaccaactacacctactacaacgtcgacggagcctccgacatcggcatgctgcgccgttacggaaaggatgcgtggaaggccaaggatccggatgacgccgattacaagatcccgtcaaacgccttggtgttcaacgaatcggacggcaccgcatcggccgaagtgtggctgatgggcggcgacgccaccgtgtattcctcacgtccatcgttgggagcgtccatgaagtctgttgaaatctccgacgtcaacaagctgaccgcaagactgtccaaaaaggtcacttcggatgagcttgaaggcaaggtctccgtcactgacgccgacggcaaggctgtagatgtcaagaacatcaagaccgacggcaccaaggtgatcatcaccacggccaaggatcttgacatgcgaggcaagtacaccgtcgaagtcaagggcttcggttcgcaggacgccatcgcgggctcggtggtgcgtacggatgccttcgacaagaagtacgcctatgacggcgacgatctgggcgccacttacacgagcgcgaagaccggattcaaggtgtgggctccaaccgccaccaaggttgagcttgtcacctaccagtccgacgatgtgaatgccgaagtcgacaagaccgtcgacatggcctctgaagacaagggtgtgtggagcgccctggtgaagaaccttgctagcggcacggcctactcctacaagctcaccttcgcggacggcacggtgaacgtctccgccgacccgtacgcgaccgctgcggtcgccaacggcgaacgttccgtggtgctctccagcgaagacatgggctccgcaggcgaccgcatgccggaattcggcaagaccactgacgccaccatcgccgaaatgaacatccgcgacttctccatcaacccgaattccggaatctccgccgacaagcggggcaagtatctgggtgttgtggaatccggaacgaagacggcgaacggcgccacctccggtcttgactatctcaagcagttgggcgtcagccacgtgcagatcatgccgatgtacgactacggttccgttgatgagatcggcgatctgagctacaacgcgcaaggtgcgcagaactggggctacgatccggagaactacaacgtgccggaaggctcgtattcctccgatccatccgaccccgcctctcgcgtcaccgaaatgaagcagatggtcaagggactgcacgagaacgacattcgcgtgatcatggatgtggtgtacaaccacgtctacaatgccgccaaccactcgttcaacaagaccgttcccggctactacttccgttatgatgacaacggttccctggtcaacaactccggctgcggcaacgatacggcctccgagcgcaagatgatgcgcaagtacatcgtcgattcggtgacgtattgggcgaagaactacaacgtcgacggcttccgattcgatctcatgggtctgatcgacaccgaaacgatgaaggaagtgcgtgcagcgctcgacgagatcgacccgtccatcatcatcctcggcgaaggctgggatatgaacaccaccatggacgagggcgagatgaccatccagccgaacgcgtaccaagtcgcgtccgacggcacgaacaacggcatcgcgttcttcaacgattccgtgcgtgacggcttgaagggatccgtgttctccgacaccgacaccggtttcgtttccggcaaggccgaccaggagagcctgatcgcccacaacgtgctcggctgccagtacgacgagaacgcgaccacgacctgctggaacggcaacgcgcaggatcactacgccgatgccggacaggtggtcaactatgccgaaatccacgacaacatgaccctgtacgacaaactcaggaagtccgtcccgacggatgacgacgccacgaccgtggcacgtgccaagcttgccgactccgtcgtgtatctgtcggaaggcatccccgcgatccagctcggccaagagttcctgcgcaccaagggcggagacggcaacagctacaacacgggcgacgcggtgaacgccatcgattgggaccgcaccacccagtacgccgattccgtcgactacgtcaagggcctgatcaagctgcgcaagcagatcaacgcgctgcgtctgaccgactacaacgacatcaacgccaacgtgacgatgctcaagtccgctgacggcgtcgtggcctaccaggccgagcagtccgacggcacctacgtggtgatcttcaacgccaacgcagacaagaccgcgatcgaaggcttggcaaacggctcctaccaagtgcttgcagccgacggcaaggtctactccgatgatgctatcgccaatgtcgatctcgccgaaggggcctcgtacgaagcgggcgcactgtctgccactgtgctgaaactcgacagcagcaccaagcccgataccgacagcgcgcctgtcatcaagggtctggtggcttccgacagcgtgactctgggatcaaagttcgatccgatgtccggcgtcagcgcatgggatgaggttgacggcgatctgaccgacaagatcacggtcgaaggttcggtcgatacctctaaggaaggcgaatacacgctcgtgtactcggtgaccaacagcaggggcaagaccgccaccttcacgcgcacggtaaccgtgcgcaagcccgcggtccagccagcttccgacaagaagagcgatgctgtgcaaagcccgaatactggttccgccatcaccggtttcgcactggccgcggtggctcttgccatcgcatccgtgttcgcgttcgcggcctcccgcagaaaggaggactgatctcataagccaatgattgactgaatgtatctcctattcctgctaggcggggccatcaaggcaatgatggccccgcctttttgtattgaaggaaacacgccgcgtctcatgccgctgatagactgaagttccatggttagaagacaacatggcaattctcaagagcacgttaccaagcatattttcgtcaccggtggcgtcgtttcctctctcggcaaaggcctgacagcctcctccctcggccgcctgcttcgtagccgcggcatcaaggttttgcagcagaagctcgatccgtacatcaacgtggatccgggcacgatgaatccattccagcatggtgaagtctatgtcaccgaagacggtgccgaaaccgatctcgacatcggccactatgagcgtttccttgacgtgtacctgagccagaaggcaaacgtcaccaccggccagatctaccaggaagtgctgcgcaaggaacgcgccggcgaataccttggacaatgcgtgcaggtcatcccgcacatcaccaacgaaatcaagtcccgcatgcgtgcgcaggcgtccgatgacgtcgacgtgatcatcaccgaaatcggtggcaccgtcggcgacatcgaatcccagccgttcctggaggccgcgcgtgaggtccgccgcgatctgggcgccgagaactgcatgttcgtgcacgtctccttggtaccgtacattgccgccgcccatgagctcaagaccaagccgacccagcactccgtcatgatgctgcgtcagctgggcatctccccggacgcgctggtgcttcgttccgaccgcccgctgaaccagtccatcaaggacaagatctccctgatgtgcgacgtggattccgaaggcgtggtcaactgtgtggacgccccgagcatctatgacgtgccgaagaccctgttcgacgaaggcctcgacgcctatgtcgtgcgcgagctcggcctgccgttccacgatgtcgattgggacgagtgggaggacctgctggagcgtgtgcaccacccgaagcatgaggtgaacatcgccatcgtcggcaagtacatcgatttgccggatgcctacctgtccgtcactgaagccatcaaggccggtggtttcgccaactatgccaaggtgaacgtcaagtgggtcgccgccgataagtgcgagaccgaggagggcgcggccgccgcgctcgaccaggtcgacggcatcgtcgttcccggaggcttcggcatccgtggcatcgacggcaagatcggtgccctgaagttcgcccgtgagaacaagctgccggccctcggcctgtgcctcggcctgcagtccatggtcatcgaatacgcccgccacgtcctcggcttggaggacgcgaactccaccgagttcgagcccgattgcgcgaccccagtcatcgcaaccatggaggagcagaaagacatcgtcgccggcaatggtgacatgggacacaccatgcgtcttggctcctatccggctgagcttgaagaaggttccatcgtcgcggaactgtacggcaccacgcatgtcactgaacgtcatcgtcaccgttacgaagtgaacgtggcatataaggaccgtctgcgtgaagcgggtctgcgcatttccggccagagtccggacggcgaactcaccgagttcgtcgagcttcctcgcgaggtgcacccgttctatgtgtccactcaggctcatcctgagttcaagtcccgcccgaccaagccgcacccgctgttcgcaggtctggtcaaggccgctctggaccaccagcaggagcgctaaatcgacgaattgtgattaacgtcggataacccgatatgcaacatggtcatgagtccaaaggagttcatggccatgttgcataataagggcttggccttgaattatcaacaagacgtattcgtaatgaaaaacctttacgagggagcatgagcttgaacgatatggattctccggaaagcggcaacggtaagttcgccttcccgaacatgggcgatgaaccaaaagtcatctcgcaggtgagcttggattcgtttgccgaaacggccgattccattgatgatggtgcagcgttgactgtgaatgccagcaagaagcgccacctgttgtggctgtggattgttcttgcggtgatgcttcttctcggtgccgtggccggcggcggatactggttcttccagtcacatgcgttgccaggtgtcacgctctggggcaagtccatgacaggacaatcccgagatcatatcatccaagagatttccgatacggcggaatcattaacggttcccgtttcctatgagggaacgagcaagaaagtcacgttgaaggatcttggcgtcgccattgacgcggaatccatcgccgaaaatgtgatgaacgcgaaacgtgacgattccttctttcagaagtatgcattctggacccgtgaggatgtcgacgtcgagtctttcgatgattctcgagtcagcgcccagacggtaggtgacatgttgggagtgcagtccgtgtccgccaccaacccgtcgctacagctcaacgcggatggtaccgctttcgatgtgacgccaggtcagcaggggactggtatcgatgtgacggatatcgtcaaagaagccaagaacgtgcttgagtcctttggcaagcagaccgctcaaatggtgactcttaaaaataaggttactgatcccgccatcacggatgaccaagccaacgaggccaaggcttctgctgacgcgtggatagcgaagccggtggctatcaagatcggcgaccataaagtggcggaattcggtgcgcagtccattgcatcggccatcacgcttggaccggatagtgagaagctcggcgataatcaaacccgaaatggctctttgattatcgatggtgacaaattgcagcaatactataacgattccatcaaatcgaacttccatgctgatcgagttgacggtgatgtcatcgttaatagtgtcggtgatgtgctgcaaaccaatgtagctgggcatgatggtataaccgttactgatggtagcgacaccaatgttggccgtgatgccgctgaggcgtttgccaagggttctgattcagtaagtattcaaggcacttgcgacccacagaatgagaaaaaaaccacgcgtaccgtggtagtcagcttgtcttcgcataccgttacagccattgaaaatgggcagaccgtccgtgtcatgcatatgtctgccggtcagggcaatgattatcagacgggccagtgccagccgagcggcgacttgtgcacgccaacctactgcgatccgaactcctacgacaactgcacgcctgacggtgacttcaaagtgtggctcaagtaccagtcccaagatatgagcggcacccttaccctatcggatggaaacaccgagaagtgggatgtcaaggatgttggattcgtcaactatttctcgaaaacaggttgcgcgattcatcgcatcgccactcaaagtgcgtttaacgacagcagtattcaggctatggggaagaacacgtcccatggttgcgtcggcgtcggctgggatcaggctgaatggttctacaattggtgcctgatgggaacgacggttcacgttcaggcctgatatgcgggctaacggcagaaagacgcaaaggcggaagactgaatgttcggtttccgcctttacgctatgtaagataaatcacgacaaatcattgccgaatagcgaaaggggcgctagtgtttagccccacgttctgttaggttgtcataggtacaaacgagtgattggaggcagcgtacggtggcagagaaccaagcgcccaacgccgcggctgacgtggagatgagccagtatgtggctgatcgcacgcgagtgaatgaagacaagatcaagcaggatgacgagatcatccagcagttcggcgactatacgtacggatggcatgacacggatttcgccggagaagcggcaaaaaaaggcattgacgagaatgtcgtgcgcgctatttccgcagataagaacgagccggaatggatgctggaaaagcgattggaaggctatcgcgatttcatcaaccgtccgatgcctcaatggggtgtcgatctgaaggatttcgacgccgacgatttcaagtattacgtcaagccgatcgacaagcaggccacgacttgggaggaattgcctgacgagatccgtgcgacgtatgacaagctcggtattcccgaagcggaaaaaagccgtcttgtctccggcatcgcggcacagtacgaatccgaggtcatctacaactcaatccagaaggatcttgaagaccaaggcgtgattttcgtcgacaccgacaccgcggtgcagaagtatccggaaatcgtcaagaagtatttcggcaagtgcattccgagcaacgacaacaaattctcggcattgaacaccgccgcatggtcgggcggatcgttcgtctacgtgccgaagggtgtgcatgtcgatattccgttgcaggcatacttccgtatcaatacgccgaatatgggtcagttcgagcgcacgttgatcattgccgacgagggatcgtacgtgcattatgtggaaggctgcaccgcaccgatctactcgaccgattcgttgcattccggcgtggtggagattttcgtcgagccgcatgcccgcgtgcgctacaccaccgtgcagaactggtcgaacaacgtttacaatctggtgacgcagcgtgcctacgtgcgtgaaggcggcaccatggaatgggtcgatggcaacattggttccaaggcaaccatgaagtatccggcctgcattctcgccgagccgtatgcgaaggccagcaccatgtcgctcggcttcgcaggcaagggccagtatcaggataccggtgcgaagatgatccatcttgccccgcataccagctccaccattgtggcgaagtcgatttcccgcggcggtggacgttccgcataccgtggtctcgtcaaaatcgtcaagggtgccgaaggatcgtccaactcgacggtatgcgatgcactgcttgtcgatgagttcagccgctccgacacctacccgcatgtggacgtgcgcgaagatgacgtttccatggcacatgaggctacggtttccaaggtttccgaagaccagctgttctacctgatgagccgcggtctttccgaagaggaggccatgggcatgatcgtgcgaggcttcgtggagcctatcagccgtgagctgccgatggaatacgcgcttgaactgaaccgactggtggaattgcagatggaaggatcggtgggctgattaccatggcacaaactcaggaaatcaatattcccgttgcggatccgaacgatccgtatgcgaatccggcagccatgccctcttcggcggatcgctcgccgcggtcatttgatgtggacgcatttgaagtgcccgaccgcaagcaggatgattggcgttatacccctgtggaacgtgtcgaagagttcttcaacgcgttcacgccgtcgaacgaaacccagattgccgtcactatgatcgacggcacggctctcactgaaggcgtgacctatagcgagggcaagccgggagacgccgatacgggcatcgtttccaagccctgcgatcgtgtgtccgcagtggaatggaactccgcctcccgtgccggaattctgcgtatcgacggtgaaatcagccagccgatactcgttaagattcatggtgccggaacggatctggacgcattccacctggtgatcattgccgccgatcgcgcccacgctgacgttgtggtagagcatgacggcgatgcacgtatcgccgaaggtgtggagattctcacaggtagggactcccatgtgtccaccacgttcattcaagagtggaacaagggctccaagcatgtgggcaaccagcgtatccacttgggggagggtgcgtccctgcgccattccgtggtcacgcttggcggcgatgtcgttcggattcgtatggatcaggattttggcggcgatcaaggcgatctcaacatgcttggcatctactttgtggatccgggcgagcatatcgaacatcgcaccatgattgtgcacaaccatcccgagtgcaagagtcgtgtggtatataaaggcgctcttgacggcaagggcgcgcactccacatgggtcggcaacgcgctgattgctccgaccgcgccgggtaccgactcgtatgagctcaaccgcaatttggtacttactccgggcgcgatcgccgattccgaaccgaatctggaaatcgaaaacggcaacatcatcggagccggacatgcctcttccgtcgggcgctttgacgatgaggagctgttctatctgcagtctcgcggcattccggaaaccgaagcccgcaaacttgtggtgcgaggcttttttggcgaactcgtcgaggaaatcggcattcccgcaatcagcgaacatctcatgaacgttatcgacaagcgcctggcacgcggcgagaacgacgcgatcgcccaggtgttggaagagaagtagaacgtaggagcgaaaaccatgtcaactcttgaaatcaaagatctgtacgcgcacgtcgaaaccaaggacggcatcaagccgatcctcaaaggcgtgaacctgaccgtcaactccggtgaaacccatgccatcatggggccgaacggatccggcaaatccacgctggcctacacgctggcgggccaccccaagtacgtggtcgattccggacaggtgctgctcgacggcgaagacatcctcaagatgaccccggacgagcgagccaaggcaggcatcttcctagccatgcagtatccggtcgaagtgccgggcgtgtcgatgaccaacttcctgcgcaccgcaaaaaccgaagtcgacggcaaggctccggccatccgcacgtggaccaaggaactgtccgaggcgatgaagcgcctgaagatggatccgaagttcgccacacgttccgtgaacgagggtttctccggcggcgagaagaagcgtgccgaagtgctgcagctcgaactgctcaagccgaagttcgccatcctcgacgaaaccgactccggccttgacgttgacgcgttgcgcattgtctccgaaggtgtgaaccgcgccaaggaagccaaccagttcggtattctcatggtcacgcactacacgcgaatcctcaagtacatcaagccggacatcgtgcatgtgttcgcagccggtcacttcgtcaagaccggcggccctgaactggccgatgagctcgaggaatccggctatgacgcatacctgccggaaggatccgattccgaaagcgcgctggcatgaccgattttgcagcgattcgcaaggaatttccgatccttgatcaggagatccacggccatccgctcgtgtatttggattccgcggcgacttctcagaagccgcaatgcgtgatcgacgccgaaagcgatttttaccgcaccatcaacgccggcgtgcatcgtggagcgcatgagcttgccgcacgcagcaccatggcgttcgaagaggcacgtgccaaagtcgcacgtcttgtcggcgccaactccgctgaaggcgaagaggagatcgttgtcacctccggcgccaccgcaggactgaatctgctagccaccgcattcggcaacgcatcgctgggacgtgggggagaagcggcacgacgtttcgctgtgaagccgggagacgaaatcgtcgtatccaaggccgaacaccactccgtgctattgccgttccaggagcttgccgtgcgtaccggagcgacattgaaatggttcgatctggacagtgaaggtcgcatcctttccaacactgcggacgaggtgatcaccgaacgcacaaagatcgtggccgtcacccatgtgggcaacaccaccggtgccatcaccgacatcgcgccgatggtgaaacgtgcgcacgaggtaggcgcggtggttgtgctcgacgcatgccagtccgtaccgcacctgaagatcgacctccacgctttggacgttgacttcgcggcatggagcgcgcataagatgtacggcccgaccggtgtcggcttcctctacggcaagcgcgacatgttggaggcgttgccaccggcgaatttcggtggatccatggtggaacttgcctggatggatcaggaagcccaatacatggctcctcctgcgcgtttcgaggcgggcacgcagccggtcgcgcaggtcgttgcggccggtgtcgcggccgaatggctgatgaatatcggcatggagaatctcgaagcccacgagcgcgttatcgcaggcgaactcctcaagatggggcagatcgacggcgtgcgcattctcggaccgcagaccaacgagcagcgcatcggcacggtggcttttgaaatcgacggcgtgcatccgcatgatgttggccagttcatcgatgcgcagggcatcgccattcgtgtcggacatcattgcgcgcagccggtccaccgtcacttcggcgtgtacgcatccaaccgcgcatccagtggcatctacaattccgtcgaagacgcgcaggcattggttgaggcgttgaagaaggtccgtccgttttttggagttgagtaacgcatatgagtgattttgcaatgtctggcgacgatctcgagcagatgtaccaagaggtcattctcgaagcctcgaagaatccgcatggcaaggagcatttcgctccggatctggcttccgaaaacgcctcccaggcgggaaagaccacggttcaggcaacccacgagtattgcactcccggcgagtcccaccagttcaatccgacctgcggagacgaggccaccgtgcatgtggaggtttccgaccaggagccgcacgttatcgaacgactggtgtgggacggtcacggctgctccatttcacaggccagcctttcggtgatggtggatctggtggaaggcaaaaccgtggatgaggccatggaattggccggaacgttccataagctcatggaatcacgcggcaaaggcttggacgatgaatccgccgaggaatcgttggaagacggcatcgtgttccaaggagtgtccaagtatccaatgcgtatcaagtgcgcgctgctcggatgggaaggcatgaaggactccgtggccaaggcattggccgcgaaagcctgacaagtattgttctatggtggaaagcaggatgtttcccgtgcttcgtgcgccgcgttctacaacgggcgaaacacgtgagacaaactccagccaacgcgataggctactcaacggaacatattcgaatcatatatggagcgacaatgagcgataccttggtacctgaaccgcaagcctcgattttcgattccgtggccaaggcattgggcaatgacgaggccgcggcgcgtcgcgtcatgcttaacccaaatctcgccaaaggattcaaggacggcaaaccagtggaaatcgaacacgaagacaccaagcaggacgcttgtggctgcggcaatcaggctggagcatgcggttgttccgaagaacaggatgacggcatcgcgttgaaggctattgacgacattggtcgagctactgcggccgacgtgaaggaagcgttgcatcaggtcattgatcctgagcttggcattgatgtgattgatttgggattggtgtatggcattgagatcgatgagcttggtcgtgccattatcacgatgacattgaccactccggcatgcccgttgactgatctgatcgaagacgagtgcgcgagcacgcttgccggcctcgtcgaggaattccgcatcgactggacgtggcaaccgcgttggagcatggaaaagatcacgccggaaggtcgcgagcagttggctgcgctcggcttcaatttcgacaatctgccaaaatactgacagaaaatctgtgatatatcaacctgatattgctgatatgttgattccgcagcgaaactgcatgttcgttgcggaattttttgtaaaacagattttgatgatatttgattggatatcatcatcaagaaaaaatggcacagaaaaagcgtgctcccgacgccgggaagcacgcttttgttctgtgtgcggcagaacgtcagtcgtcgaccacggtacccttcggcaccacggtgatgccttccggcgtgacggtgaagccacgggccagatcatgttcggtatcgataccgacggtcgaattctcggtaagcacaacattcttgtcgaggatcgccttgtagacgcgtgctcgacgattgatggtcacgccgtcgaacagaatcgaatcgacgacctgggaccacgagtggatacgcacgttcggcgaaagcacggaatgatgcacttcaccgcccgatacgatgacgccaggggagacgatcgagtcggtggcgtgtccgagacggtcgcgaccggcatggacgaacttcgctggcggcagattgccggacagcgtgtaaatcggccattcggtgttgtacaggttgaattccggcacatacgagatcagatccatatgcgcatcgtagaactgcttcagagtacccacgtcgcgccagtaggcatgatcggtcggcgtcgctcccggaatctcgttggagttgaagtcgtacacgccagcctcgttacgggccgcgaagtacggtgcgatatcgccgcccatatcatgcttggtgtcttcggccttctcgtcaagcgccaaagcttcgaacagggcgtcggtgttggccacgtagttgcccatggaagcaagaatggagttcggatcatctggcaggccggtcgtggtctgcggcttctcctggaagctcttgatcatattcgggtgctccggatcaacctcgatcacgccgaactggttggactggctgatcggctggcgaatacccgccaccgtgaactccgcgccggattcgatatgctgctgcaccatctgctggaaatccatgcggtagacgtggtcggcgccgacgatcaccacaatatccggctgcacgtcctcgatgatgttgatggtctggtagatggcgtcggcagagccgagataccagtgcttgccaagtcgctgctgagccggaacaggggagacgtagttgccgagcaacggcgaaaaacgccacaccgtggaaatatgacggtcaagcgaatgggacttgtactgggtgagcaccacggtctgcatatagcctgaattgaccaaattgctcagcgggaaatcaatcagacggaacacgccgccgaacgggacggcgggctttgcccggtctctggtcaaaggcatcagacgagtgccttcgcctcctgcaagcacgatggaaagaattttcggattctttgccatgagaactcctctcctagagcgtcgttacgacaccgcacacattggtcggtctgcatcatcgcaaaccacttacgcactcaataattgcatattttctgcaacatgcaaggagtttgcatcgcgagtcttgaaaatttgctgactgtttcagtgaacagctgttgaatagaaggccacggcgctcgatgcggcgacgttaagactgtccactccgtggctcatgggaatcttgaccgtcaggtcggcgcgggagatggtgtgatgcgacagaccgtcgccttcggtgccgaaaatcagcgccaatttgtcgatatggtccttttcgccgttgtcgttgttcaaacgacgaacaagctcctccagcgaaatggaatcgtcttcaagggccatcgcaacggtggtgaacccaagatcgcgcaattcctgcatgccggtgaatggccagtagtgtttatcatctccgccgatacgagtccacggaatctgaaacaccgtgcccatcgacacgcgggcggcgcgtcgatacaacggatcgccgcaggagggcgtcaccaacactgcatcgacgttcaacgcggcggctgatcgcatgagggctccgacattggtgtggtcaacgatgttttccatgaccgcgatgcgtcgtgcgccgcgacacacctcctcgacgctgggcagtggccagcgtttcatcgcggccagggcgccacgatgcaagcggtagccggtcagctgcttgagctgttcaggggatgccacgtacacgggaatgtcggtgccccaacgttggtcgatgcgtgcgaaggtttccgacatgcctccgatccacggttcttcgacaagcagggaaatcggttcccggtcggcggtcagcgcgcgatcgatgactttcggcgattccgcgatgaacaggcccttgctgggttcaagcttgttgcgaagctggatttccgtgagattcgtgtatgccgacacgcgctcgtcgtcaatggaatcaagatggatgaactgcatgtgatcgatctttcgccgaatagctttcagatacaagaaaaccccttgtttccaaggggtttgctggtgtccggagcgggacttgaacccgcacgcctgtataaataggcactagcacctcaagctagcgcgtctaccattccgccacccggacaggtgcgttgctcagcggcaacaaacgaaaactatagcagatgctcggtgtgatgcaagtctcggcgtgtcgcgcggaattacgccattggtatccgaggtgctggtaggctctgaaactatgactgatgcccttttcctgcttgatacggaacatgatgatgtgccggtgaacagtgacgaattgaacgccggatggaaattgacgttgccccagtcggtgcgtcgacatgccattcaggccatgcgtctgaaagacggtgacgaattgcagctttccgacggtaaagggctacgtatccacgcggtgttgcgcgatgcgcaacaaggaatcgcggaagtgtcgagcttcggcaaagaaccgcagcctaccaccaaactcgctttgatccaagcgctggcgaaaacaggacacgatgagcaggccatcgacaccgcaacgcagatcggtgtggatgaggtgattccatggcaggctgatcgttccatcgccaaatggaaggcggggcgcaccgataagaagtggcggcaagtgcttgatgccgccactgaacaatcccgacgctcctggacgccggaattgggggagtgcgtgaccagcaagcagttgattgccatttgcaagcgtgcctgtgtgcacggcgacatggtgattgtgctgcaccaggatgctaccaaaacttggagccagctggaggaagcgatcgcggtgctttccgacaaatgcttgcaggacgggcgccagcgcaccgtgtacgtggtggtcggcccggaaggcggcatcagcgatgctgaaatcgaatccttcaccaatgcgggagctgaagcatgcgtgcttggaagcaatattctgcgagcgtcgacagctggtcccgtcgcgttatcgctgctcgcacgggcgttgggacgattcatctgacgccacacgccggcgaaatgcggcggattatcccggttgcgcaatagcatgggtaccgaaggacaaccagcattaaggagcattatgagcgacaaggattgcctgttctgcaagatcatcgcaggagaaattccaagcgaaaaagtgtatgaggacgataccacctacgcattcaaggacatcaatccgaaagccaaagtacatgtgctcgtggtgcctcgcaagcattatgcgaacgtgaccgagcttgcggcggccgatccccagcagctcgcccacatggctcaggtcgcgcaaaatatcgccgaccaggaattccacggtgccttccgcctgatcttcaacaccggaattgatgctggccagacggtactccacgtgcatgctcacgtgctgaccggcgaaaagcttgacgaataatcttccctttccccatatatcgacgtcagaagaggttttgtggccactactacacgtaccatcgcgattccgcagcagcttgacccggtgaccgtgctcggaccggtcgacgaggtccttcgggaagtggaacgtgcgttccccgacttgaccattatcgtcagaggcaaccgcatcgcgatcatgtcacgttccagcaaatccgaatcccaagccgcacaggccgagcatgtgatcgaaaacatcatccaagccgcatatacggctccgatggacgccgatacggtgcgacgcatgctcgatcaaaacgtgttgaaaaatcctgtgcgtgctactcgcccgggccatggacgtgtagtggaggaactacggctggccgatcggcaacaggagcatacctccaatcgcgagaatcatgcggaccgacgcaaaccgcatgtgcccggagtgatcacctttgcgctcggcaagccggtgcgtgccaaaacggctggtcagatcacatatgtcaatgccatcgaatcacataccatcacatttgccatcggaccggcaggcaccggcaaaacataccttgcagtggcgaaagcggtacgcgcattccaagataggcaggtgcgccgcattatcctgaccagaccagccgtcgaggcgggagaaagccttggttttcttcctggcacattgaacgaaaaagtcgatccatatctgcgtccgctatatgatgcgctttctgacatgctcggggcggaccagctcaagcgctacatggatgacggcaccatcgaagtcgcaccgctcgcatatatgcgtggacgcacgctcaacgatgcattcgtgatcctcgatgaggcgcagaacaccaccgaacaacaaatgaagatgttcctgacccgactaggcttcaatacgaaaatgattatcaccggcgacgtgacgcaggtcgatctgacagtaccgaaatccgggctcgccaccatcgaacgcatccttgacggcattgacgacatcgcattcgcccacctcaaaccggaagacgtagtgcgacacgcgcttgtcggcaaaatcgtcgcagcgtacgaccgacacgcggccattgccggcgaccacagcagacacgccacgggcaaaaccacatccaggcaaacaagcgagcaaatcgaaaggaacgctgaatgagcgtcgaggtaaccaacgaaaccgtctggcaaattgacggcaaggtgttctccgatcttggcatatgggtgatggaccaaatgcgggtcagcacgcaatccgacctgaccatcatgttcgtagaccccgatcccatcgcccaactgcacatgcgttggatgaatcttgaaggccccaccgacgtgatgagcttccccatggacgagctgcgcccaggagacggccgaactgtgatggaaggcgtgcttggagatatcgtgatttgcccgtgggtggctgcgcagcaggcgctcgcggccggacataacaccatggaggaaatgatgctgctgacgattcatggcatcctccacctactcggatacgaccatgccaccccagaacaggagcgtcagatgttcggtctgcagcgacagctgctactcaccttcttcgcgcttcgccagggagcggggacgcaggccatccttccgccggatacgccggacgcgctcgccgaatgggataggcagcatggcacgggacggcagatcgccaaataatgattgacgttgccggtagcatatcgtccggcatgatgggggctgaattatgcaggcaacaatgattgcgatgatcgtggtgctcgccgtggtggcgctgctgttggtctggctgtcgctttcaatggccgcgactgaaggcgctgtgggacgtgtgaccagggcgagcctgaataaccttattctcgaaattcaaacggatgccgagctttcgcaattcatacgcgacaagaaaatcaggcgcattcataaggttcagcggttggtggccgatcgctatgccaccgccggatcgtgcgcgttcttccgcatctgctgcaatgtggttgatggtgtgctcgtgacggtgattgcgggcatgttggacgctccactatgggccgaattacttgccggatttgtttttgccatcgtcattgcggtgatttcgctgttggtgcgtccgcgtagtgccggggcatccaagccagtcgacattatgctgcagcatgtggatgctgtttccattgcggttctattaaccccattcgcaaaaatcggggggcaaaaaggcgcgaagcgtcgcggcagtgatctttccgacgacgaggagctcgaaaaaatccagatcgaacaaggacgggcaaccattgaccgtctggtcgaagccaacgatttcgatcctgaagtttccgaaatgctgcgcaatgtgctcacgctttccgaaacgctgactcgtgagatcatggtgccgcgcaccgacatgatttgcatcgagcgagacgaaacgttggagaatatgcttaagctttgctcccgttccggattctcacgtgtgccggtcatcggcgacgatgtggacgatctggtcggcgtggcttatttgaaagatgccgtgcgcgcgacgaccttcaaccatgcggcgatgacacgcgaagtcgaatcgatagttcgtgaccccatgctcgtgccggaatccaagccggtcgacgatcttttccaccaaatgcagcgcacacgccagcatgtcgccattgtggtggatgaatatggcggaatcgcgggcatggtcaccatcgaagatgccatcgagcagattgtgggcgaactggaagacgaacatgatcgcacgcaacatgccgatccggaacggatcggtgacaagaaatggagcatgcccgcacgcacgcctatcgccgacttggaagagattttcgaaatcgacattgacgaggatgatgtcgacaccgtttacggcttgctgaccaagctgttgggacgtgtgccgatcgtcggatcctccgcagtcactcgaggcttgcgcatgaccgcggtcgactccgcaggacgccgcaaaaaagtgtcgaccattgtggtggagccggcccacgtcgagggcgtggacgaaactgaaacacgtaacgaagaacatgcggatgatgccgaaaaggcatccgacaacgataaggattccaaagacaagcatgactgacgcagcaacaaccgagacgacttccgaccattccgattccgccacgcccgttccatatcggtccggtttcgttgccgtggtcgggcgtcctaacgtgggcaagtcgacgttgatcaacgcgttgatcggtacgcagatcgccatcgcatcatctcgcccggaaaccactcgtaaagccattcgtggcattttaaccacggataatgcgcagatcgttttggttgatacgcctggcatccatcgaccgcgcacactacttgggcagcgtctgaacgatgttgtggacgagtcgctcgccgacgtggacgccgttgctttcctgctgcctagtaatcaggagattggtcccggcgacaagcgcattttgagccgtctgcgttctgatttcgcagtcaagcgagatgatggcacattcaaatggaaggtgccgctggttgccatcgttaccaagattgacgaattaagccgtgacgggctgatcaacaagctcattgaaatcaacgaattcgccgacttcaccgatattgtgccagtcagcgcgctgaagcatgacaatcttgcggaagtcaagaacgtgcttatcgagaacatgccggaaggcccgcaaatgtacccggccgagcagatcaccgaagagcgtccggaagaaaccattgcggaactggtccgtggcgctttcctggaagaattggatgacgagttgccgcattcactggccgtagtcgtggattccatcgaatatccggaagacaacgatagtggcgaagcttacgatggcaaagcccacgtgattgtgtcgatttatgtggaacgcgattcccagaaaccgatcatcatcggcaagggagcggaacatcttgtgcgtgtcaagaagaagttgcgtacgccggtcaaccgtattgttggacagaaagccaaactcgatttgcatgtcaaggttgccaagggatggcagtcggatcctaaacagctcgagaagctaggcttctgatctgtttaggatccgcttcgcagcgaagctgctcacttcacctaaggacagtccactggactgtccttttgacggttcagccaaacagctcgagaagctaggcttctgatctgcttaggatccgcttcgcaacgattgcgtggaaaataataaatgaggtctgattcccgtaggagtcagacctcattctgctgtttcgaagactacttcttcttggtgtacatctgcgtattcagcaaagtggcataacgcttgatgaccttcggacgaatcaccttcatggaagcggtcatcaaaccattctcctgagtgaattcctccggcagaatgatgaacttacgtacggactccgcacgggaaacaccttcgttggcctgatcgacccacttctgcacttccgcacggacggcggcattgttggcggcctcctccatgggtatgtcgcgattcagccccttgctttccaaccacggacgcaaggattcctcgtcaagcgtaacaagtgcggaaatgaatggacgcttgtcgccaagcaccaaggcctgggaaacgaattcgcaacgcttgataacctcttcgatcggaccgggcgagacattcttgccgcctgcggtgatgatgagatccttcttacgtccgatgatatacaggaagccgtcatcgtcgatacgtcccaaatcgccggtacgataccagccgtcttcagtgaatgaatcctcggaggcttcctcgttcttgtggtacttcgggaacacggcggtacccttgacctgaatctcctcatcttcggcgatacgcagctcgaagccagggaaagccacgccgacggaaccctgatgatagggcacaccaagcggattgaacgcgcaaggagccgtggtctcggtcaagccataaccctcatacacgggcactccggcgccacggaagaacgccataagttccgggtcaagaggagcgccgcccgccacgatccactgggcacgtccgccgagcacctcgcgtagcgaagcgtagaccaccgggtcgaacgccatacggcgagccttggccaaagctccggccttacccttcgcactgacctccttcatgtaattctgggctgccacaacggctgcggcgaacgccacgcccttggcgccatgaccagccttctgcgaggccgcgttatacaccttctcaagaacacgcggaacaacgatcatgacggacggcttggcgacctgaagatcggcgatcagcgtcttgatgccctgcgcgatgtaaatatgcagttcgctggctacgcaaatgtagttgatggcacgtgcgaaagagtgcgcctgtggaaggaacagcagcacgctgttcttcctctcatgcagcagtttcggcatatacgccggaagattcaacgcggtggtgcaataatgctcatgggtcatctccacacccttcggcgcggcggtggaaccagaagtatacacaatggagcacaggtcggttttcttgatggaagcgatgcgctcgtcaagctcttcgtcgctcacgccggagccgtaggccatgatttcgtcgagaccgccgttctcgaagcagataatgtgttccagtgccgggcattccttatcggcaccatcggctttggcgcgcatatcggtggtctcgaccaccagcaagcgggaatcggaattattgacgatattacggatctgctccgcggaatccgtgtcgtagatcgtggcgagcacaccaccacatgccatgacggccgcgtcgaacacatcccactcgtacgaggtacggcacatgaacgccacgccgtcgcccttcttaagaccgtaatgcatcagacccttggcgatctgacgaatatcggcgagcacctcgttgccggttttggtcacccattcgccgttcgtcttataggtgtagagcggctcgtcacccatacgctcggctcgatcggcgtaaatatcgtagatggtggtgccctcgtccagcggcggcttgccctcggttttggtggtcaacagaccggtttccggatcgaggaacgtggtggatgggaatccttcgccccattcgacggtgtgcggaaggtcgatatggccgtcgggggagatgatgttgttcggatcgttgtaatccggagtgttgccggaatcgtcgctgacggggtgaacgaagtcacctcccaaacgcagtgccttctgcgcaagatttgcagctcgcttgttcaaagaggtgatgacggacacgtgactctcctacacatttaaatccaatatctgtaggaatgatagacccatgaatgcgacacgtcaccttacggtagcgtagggaaagtgcgcatccagcggggcctgcgtaaaggaattgccatgcgatgccattcaataggtgaacttttcttcatacaaaggtgtgacctacgttacactggtgcgctgtatctgttcattttgatttctttaacgaggaagaaagggcacctatggctgaaacagctgaagccaccgtggtcttcggagttctcaatgagacctccgaacacgagtctcgtgttgctctgacaccggatatcgtaacgaggttgcgtaaatcgggtgttaactgcctgatcgaatccggtgcgggcgtcgcatcgcattatgttgatgaggattatagtaaggccggagcgcaggtcgtctccgccgatgaagtgattgcgcgtgccgacgtgcttggtttcgtcgatcgtccgagcagcgcgctgctcggacgcgttaagcagggtacctggattatcggtatgctcggttcgttcaccgacgccgattatgtcactgcgattgaaaaggccggtctggtcggtgttgccatggagaagctgccgcgtcagttgagctccgcgcagtctatggacgagatgacttctcagaattccgtaatgggttataaggcggccatcgtggcggccaacgcgtacggttcgttcctgccgatgatgaccaccgccgctggcacgatccgcccggccaaggtgcttattcttggcgcaggcatcgcgggtctgcaggccatcggcaccgccaagcgtcttggcgcggttgtcaccgcgtacgatgtgcgtccggcttccaagggcgaagttgaatccttgggcgcgaagttcctggatctgggtcttgacttctccaagggtcagggcgagggcggctatgcccgtgcgctgagtgccgaagagcaggcccagcagcaggctgccgtcgatcagaaggctgccggcttcgatatcgtcatcaccaccgccaaggttcccggccgcaagcctccggttctgctgaccaaggctggcgtggccggactgcaccgtggcgctgtgatcgtcgactgcgcggcaagcgacctcggcggcaacgtcgaaggttccaccgtcggcacccaagtcactgaaaacggcgtgaccatcatcggcgctccgtacctgtcaagcggcgtttccactaccgcatccaacctgctgagccgcaatgtggccgatgtgcttgcgcatttcgtgcgtgacggcaagctggccatcgatctgaacgaagagcttgacaacgccatggtcgtggccggccgcggcgaggaagccaagaaggaaggggagtaagcaatggatatcgttgttgcgattactctgttcgtcctcgcgctgctgatcggcgttgaggttatcggcaaggtgccggccaccttgcatactccgttgatgtcgggcgcgaactcgatccacggcatcgtcatcgccggcgttgttatcgtcgccgcgcatgccaccagcccgctcgcctgggtgttcatcttcctggctgcagtgctgggcacgatgaacgtggtcggcggctatgtcgtcaccgaccgcatgctggagatgttcaagtccgacaagggcaagaagaaggaagaggaggccaagtaaatgggtaccatggctgaaatgctgagcacgccgctcggcgtcatcgaatggttcgtctatctgctggccgccgtgatgttcgttatcggcctgcacttgatgaactctccgaagaccgctcgcaagggcaatatggtctccgctgtcggcatgatccttgccgtggtcatggcgttcattgtgctgttcgcaggtgagatctccaacggattccagcatggcgttgccgttgtgctgctgatagccggcatcatcatcggtgccgtcgccggtgtggtttccgccaagaaggtcaagatgaccgacatgccgcagctcgtttccgtattcaacaccgtgggtggcggcgccgccgcgcttgtggctttgaacgacattctgacctccgagggcacgccttccatcgtggtgttgatcaccgctggtttgggcatcatgatcggttccgtcacgttctccggctctctgatcgcagccggcaagctgcagggcatcaagtgggtgaagaagctgaacttgccgggcaagggcttctggaacattctgttcgccgtactgaccgtcgtatccttcgtcatgctgtgcgtgcagccgggccagcgtctgctgtggtccgtgctcaccaccgtgttcgcgctgtgctacggtctcgtgttcgtcatcccgatcggtggcgccgatatgccggtggtcatttccgtactcaacgcctgcaccggtactgcagtggccatgtccggcttggctatcaataacatcgctctgatcgtggccggcgcactggttggtgccgccggtgtgaccctgtccatcgccatgtccaaggccatgaaccgtccgctgctgtccgtgcttgcaggcggtttcggtggtgccaatgccgccgctggcgctggtgagggtccggaaggcagcatgaaggaaacttccgcggacgatctggccgtacagctcgtatacgccgaaaaggtcatcttcgtgccgggcttcggtctggcccaggctcaggcccagcgcgagcttgctgatcttggtgtgctcctcaagaaccacggcgtcgaagtctcctacgccatccatccggtggcaggccgtatgcctggccacatgaacgtgctgctcgccgaagccaacgtgccgtacgaggagctcgtcgatctggatgacatcaatccgcagttcccgcaggccaacgtggctcttgtggtcggcgccaacgatgtgaccaacccggccgcacgcaagccgggcaccccggtctccggcatgccgatcctcgacgtcgacaaggcccagaatgtggtggtcatgaagcgcggtcgcggtaccggttatgccggtatccagaacgaactgtacttcgaagacaacacgcagatgcttttcggcgacgccaaggcaagcctgcaggccgttatcgcggcagtcaaggagctcatcaactaacagctgaaacgttgcgttgatgcttttcctgaaaggtctcttccggtgagggaagggacctttttgcatatggtgattttcgtaagatcaggtctgttgcatgcgaattgtgagttatccacagtcgttattcgcctgtggatatgggtggagttttccacatatccacagattttcaaggttcggtggcgcaagatgatttgaatatgagacagtaggtgcaccctacaacaaaggagttgcacatggcggaaataatcactggcccgttccatatggatgaacagggatttttggcaacgatcgaagaacttatcgagcggtttgatggatacagttctggcaaatatcttgcggaattgggaaaaatccacgatgaatacggtgagatcggatctctttcgctttttgacgaaaaagtctgtgaactggggaaggaattattctgcagcacatcatgggtggcgaatctggcgtgggccatgatttcgttcgattatgatctggttgagcatgatgcgaattttcttgatggatgccgtaacatcgtgcgtaagtacggtatgagcgtttggctctatgaaatgatcaatgacgcttcgatagcggtggctttgcaaaggcccagcagcagaatgccattccagattggattgacctacaccaaggatgtgtttcggagaagcaagaaaaagggtggaaaatacgctaccagcaaaaagaagagactggcctgcatggctgaatatttgcaggaagtatattggctggccgcgtacagtctgctacgttggggtgaggaagagccgcgtgcggccgatgttgcgttgatggtgcttggatatggcggtatcggcatgtgcatgctgagggacgatccgaaagtggtggattccggatgcgatgaagacttctcctatcgaaatctgtgcgaccatctgcgcgatcttagaattcaagccgatctggactatgcttgcaatgccgaccttgccgaatccatgttgcttgaatatcccgcgtgtatggatgcgcgatatctgtacgatgcggggaaaatcgtggaagcgtatcgtgctttgtggaacaagcagactgaatcagcttcgcaaatcatggaacgcgtttaccagaagggcgcgtatcaggtgacgaacatttgggaggatccgctgtacctgcatgatcttgccctgtcgctgttgggggcagtcggctcgcggccccttactgaagggttccggactcgtgatgacaagatgttccagcagggagtggaaagtctgagacgaacgactgaatccgttaaagggatggggttggcgatgacattgggagggtacatctgcttcccggaaccggaaagtagggatgatgcgcttttcgcaccgcgaaaggagaagaaacgattaatggacgcctgtaacgggcttagggatttgtcggcaatggttgcgctctaccgttttccaagggatatcgaatccctgcgtgcaacgcgtgcgcttctcgctcatgacgcgaagggatatatcgatctgatgggtccatacatgggaagcgcggatgagacgggaggaaacgaggggaggccggtttcaatcggcgactgatcggcctctcagatcgcgaacgtcaaagcgtatgtatcatggttgtgccgagattgaatggcggaacgttcagatgaactttgtctcttcgatctcggtgcatgctatgccgtattgctccaacaattcgcgaaatgcttttacgtatctatctgtggcgaacttctgtgtgaatgacagacagaagttctcgtttacgtaattcacttccaccagcgtggacgtccaatccgcataggcgtaacaattttggacatgccgtgccaaagaaccccgatcgaacattcctgtataactgatgtcagctgttgaacatcgcatgctgataacttgtctgcacatctgtttctgggcttccagattcggcaggctctcaagatagtgattcagccaagtggttcctgccagcttgggaatcagtgtttcaatatcgcacgcgtctacctgttcatggggcattttcagcttggtccggcagatgcggcccttggcacaatctttgcacagaccatcagtgtgatcgtcgcgctggtggtgattcgttgcaagcagaaaggcattcgtttaaggaaggctgatttcaagccgaatcgcaatatgttgggcggcattctcagcatacggacgttcgtatatcggcttcattaccctgccttacttggaaatcgtatcgtcaaggtgcgcaaacagtgggcgagccaaccatgccaagggtagtgatgccagtgctgaaatcagcagaataagccaaaccgtgcaatgtgcgtgcagccatccgtaaagcatttgcccgagtggctgggcgcatatcgtcaatgatgaaataatggccatgaccttgcctgtaagcgcggttggtgtcctcatctgaatagatggtacgagaatgaggttcaagaaatcaacggcgattatgactgccgcagtgcagagcaccagcatgatgagcttggtttgcgttgaacatggaagcaggaaggcgatggccggtgggagcagcataagactttccacgaacaacaacgaaggggcgtttcgtgatttcaaacggttggcgaaacagccagcgatgaatgttcccgctatgccggcaatgccgataatgccatcgcatagaccatatgtcgccgcatcgtagcctaacgtagttcgaataatgtaaggaaagcttactgaactgaatccagtcagtatcagattgatccatgtgcaaacaccggctaatcgtgctacggtcggctccttgcgaagcaggaaagcggtcgccgaatgcatatcgccaatgatgacgtcgagcaggcagatgccggcatcatcttgattcgataggggctttgcgagtctgatgaagcattcaaccatggctgccgacataagacatgctgcggtgatgagcatcatcggtcgaatgccgaccagcccgtacatcacgccacctaggaaactcgggagtaattggctgagcggctgcacttggttgatgatggccgcgcctcggcgaagatcagtggaggactctcttccgatgatttgtggcagtgcggattgcacgacgggagtttccatggcatcgagtactgccaacactacctgcatgatggcgatggcgagaatgttgaatccggatagtgcgaaaaacacagtcgcgagcagtgtgacgattcctgagatgatatcgagcgccaccatcatggcacgtttgcttactcggtcggccataacacctccgaatgggctaataagtatggtcggaatgacggatatggccagcacggtggcgaaggtcgtggatgatgcggtttcgtccagtacccacatggacatggcaaatcggagcatggtattgccgaacaaggaaatgccttgaccgagtacaagcaggatgaagtttgcggagcacaagctggattggagtgtctttgctgacgagtttttcatgactattcctttcgataccgactgacggtatgtaaaaaaggtacaaataaagacagattgacattgccgagcttttattgcggattactggcgagtaggaagaagccttccgcaagccgatcttccatatcactgtcgtgatcgataagtggaactccgagcgagtccataatcaatccaagaccgtggatgcgatgcttgaattcacttagggtagtgatggggtagaagtttggggctagccagtaattgaacagcagtgaaaaaagttccgcggcttcttgagggtattcggttgtgattgaaccgtcccttaacccctcctggatgaagtcgtacgcgattttggtgctgtcggttcgccagatgcgaagattttcggcgaggattttcgggtcgttcagcaggggaaacgcatcgcgcatgagggtcatatgttcggtgtcggtaatctgcatcatgagcgaattgcgtagtttctgcaatccgtttcgtgagccatcctcttgatttgcctggggaagaagtcgttcgttgtcggaatctaccagcgcatgcagcatcgcttctttgtttttgaaatgatggtagatagcgcctttgctgaggtcttcgagctcgtcgagaatatcttgaatcgtggtgcgctcataccccttttgcgcgaacagctttttcgcggcgtcaaggattcgctgtcgtgtcacttcagggtgcgcattgcgcgccatatgcctctccttcgatgatggagtcgaatacaccgacattatacataccgttggtcggtatggtatgtcggatatctcccagctcgatcgaaaagtgtgccgaaagactctctgcagatttctgcgaagaaacctgaatctgcgttgccggggtgcgggatgtctgtcttttctgcggttggtgcatgattgggtgtccaaggtcaacttgagtgagtgacggctggtttcccgaagggaataagaccctggttcctatatgcctttttatggcatggggctttcggtgaagaacgattgcatccgatgtgaaaaatcccacaaatccggcccacgtcctgctcgagaacttcaaaactgttgccaatactggaaacacgccgtatatagtgtttgaaaatgtgacgagacactgtatgttgtggtcttgatttttattttcgttcggataatgtgtgccacataccaacgacgtacggtcgtgaaaggacgtggaacatgaacattacgttatacaccaaagcaaactgcccgcaatgcacggcgacgaaacgccaattggacaaacgaggccttccctatacgactgtcgacattacggccaacgcacgtatttccgacagattgcggaacgaaggatggcggcagatgccagtcatcatcgcagacgacgaatcctggtccgggtatcgtcccgacaaaatccacgagctggaggctcgctgccggtgagcgcgttggtgtacttctcgtcggcatcgggcaatacgacacgcttcgtcgaaggatgccgattggatgaattcggcattcatacaatgcgcataccgctgcggccggacgagccggagctgcatgtggatgagtcctacgtcttgctgacacccacatacggcggaggaacaatcggcaaagcagtgcccgtgcaagtcaaacgattcctcaatgatgaacgcaaccgcagtggcatcatcggcgtcatcgcatcgggtaacaccaacttcggcgaagcctacggcatcgcaggcgacatcatcgcggctaaatgccgcgtgccgctactctaccggttcgaactgatgggcacttcagaagacaccgcgaccgtgcgcgaaggactgcgcagatttttcgacgaatacacacaacaggaacaacgataaccatgccagaagattcaacgacaccacacgcagcaaccgacgtcatagcctcctacgatcgcgcccatgactggcactcgctcaacgcgatgctgaatctctacgacaagcaggggcgcatccaatttgataaagacatccaagccgtacgcgagtacgtcgaaaagcacgtgctgccgaacaccgtccgtttcaactccacacaagacagactcagccggctcatcgcagacggctattacgacgaatccgtatttgcccaatatgatgccgaattccttgacaggttctaccgcaacgtggatgactgcggattcgaattcgatacattcctcggagctttcaagtttcaccgctcatacgcattgaaaacctttgacggcaaacagtacctggagaacttcccgcaacgcgcggccgccgttgcgctcgcgcttgccgccggcgaccatgcggccgccgaatcgtatttcgaagaacttatatcaggacgtttccaaccggcgacgcccactttcctcaacctcggcaaggcgcagcgcggagaggcggtcagctgttttctcgtacgtatcgaagacaacatggagtccatatcgcgtggcatcaacgccgcattgcagttgagcaaacgaggtggaggcgtcgcgctgttgcttagcaatctgcgcgaggccggcgcgcccatcaagcgcatcaaacaccagtccagcggcgttgtgcctgtgatgaaactgcttgaggactctttcagctacgccaaccagttgggcgctagacagggtgccggtgcggtgtacctcaacgctcatcatccggacatcatgcatttcctcgataccaaacgcgagaacgcggatgagaagatccgtatcaaatctttggctcttggagtagtgatacccgacatcacattcgagctggcgaagagacacgaacctatggccctgttcagcccatatgacgtcgaacgcgtcatgggcagacccttcgccgatgtctccatcagcgaaaactaccggaatatggtggacgatgaacgcatcgggaaaacctacatcgacgcacgagagttcttcatgactttggccgaattgcaattcgaatccggatacccgtacatggtgttcgaagatactgtgaaccgagccaacccgatcgacggacgaatcgccatgagcaacctgtgctcggagatcctccaagtgcaggagccaagcacctatcatgaggatctgtcctacaatcacgtgggacgtgacgtgtcctgcaatcttggatcgctcaacatcgccaaagcgatggacggtgatttgggacgaaccgtggaacgtgcgattcgcgcattgacctcggtgtcggaacatacggacatcgcgtgtgtgccatccatccgacgcgccaacgacgaaggtcatgccatcggcctgggacagatgaacctccatggattccttgccagagaatcgatcatgtacggttcaccggaagccctcgacttcaccgacatgtacttcatgaccgttgcataccatgcctaccgtgcctcgcatgagctcgcagtcgaacgcggaacacggtttgcaggcttcgaacggtccgcctatgcgaagcctgcaggcgcaggcaactatttcgacaaatatacgaacggcgagcgctcgctggcgccgaagaccgggaaaatcgcgtcgctgttcgcacggcggggcatccatatccccaacgaggatgattggcgtcgtctgcgtgacgacatcatacgtgacggtatcttcaaccaatatctacaggccgtgccgcccaccgggtcaatttcgtacatcaatcattccacgagttccatccatcctatcgcctcgaagattgagattcgcaaggaaggcaagattggacggatctactatccagctccgtatatgaccaacgacaatctccagtatttcgcggatgcgtacgaaatcggatggaaggccattgttgatacgtatgccgaggcaacgcggcatgtcgatcaaggcctgtcgttgaccttgttcttccccgatacggcgactacccgagatttgaacaaggcgcagatttatgcatggcgcaaaggcatcaaaacgctgtattacatccgcattcgtcagcaggcgttgtctggcaccgaagtacaaggctgcgtcagttgcatgttgtgaaacctgtgacttgaaaggaaaagaaaagacatgtctcgtttggtttaccgcgcgatgcttcgtctgacggctccggacgaatacaggcggttatacggccgcgacgataagacgacgattagaaaggacgaccatcatggcgccgatatccgtacctcgacagaggattaagctcattgaccgtgtgagtgccatcaactggaacaaacttgaggatgacaaggaccttgaggtatgggacaggttgaccggcaatttttggctgccggagaaagtgcccgtctccaatgatttgcccgtttggcgcacaatgagcgaggccgagcatacgttgaccatgcgcgtgttcaccggtctcaccttgcttgacaccatccagggaaccgttggcgcggtcagcctcatacccgatgcgcttaccccgcatgaggaagccgtctatacgaacatcgcgttcatggagtcagtgcacgccaagagctattcctcgattttctccaccttgtgttccacccgacagatcgacgaggcgttctcttggagtgaggagaacgagtatctgcaaaggaaagcgcgcatcgtgctcgactattacgagggggatagtccactcaagcgcaaagtggcctccacgctgctggaatcgttcctgttctactcaggcttctatctaccgatgtatttctccgcgcatgccaaactcaccaacaccgccgacgtgatccgtcttattatccgcgacgaagccgtgcatggttattacatcggatacaaatatcaaaaagggcttgagctggtcagcgaggacaaacgcggcgaactgcgcgactacacctacgacctgctcaacgagttgtatgacaacgaggtggagtacacgcgcagcctctacgagcctgtcggattgacgcaagatgtcgaaaagttcctgcgatacaacggcaacaaggcgttgatgaatctcggatatccagcgcttttcccacaagagatctgcgacgtgaacccgtcgatccttgccgcgttaagtccgaacgccgatgagaaccatgacttcttctccggttcgggaagctcgtacgtaatgggcaaatcagtcgagaccgacgacgatgactgggatttctgactgtatcccagacaaccccgaggaaagcagctatgggaaaccgtcacgggcgagttcgcgtcggatcatccacgcagatatctgcccgtgacgctgtcaggacaggcacggaccgtttccggtgttccctcgcatacgatgcgaccgccggccatgcctccgcccggacccatgtcgatgagataatccgcgttcgcgattacatcaagatcatgttcgattactacaactgtcgccccagaagccaccaacgagtcgaacacgcgtagtaataccagcacatccaacgggtgtagcccgatcgtcggctcgtcgaacacgaataccgaaccggactgtccgcgtcccatttcgctggccagcttcagccgttgcgcttcgccgcctgataacgcaggagtcggctcgccaagtgtcagataccccaggccaagctcatgcagtgtggccagtttcgatcgaacggggcgtaggaaatccaatagaggcatcatctcgtcgacgcttagcaacatcaattccggcagtgaacgggcgacgctgtccgcgcaaaccaatcgaatgtcatcggcggtctgtgcataccgtgtcccatggcaatcgggacacgtgacgtcaacatcgggcaggaactgcacgtccaacgaaatggtaccggttccatcgcaagtggagcagcgcaacttgcccgtgttgtatgagaatgcgccaggtttgagattcttcttatgggcatcggaagtcttcgcaaacgcacgacgcagatcatcgtgaacaccgcaatatgtcgccacggtcgaacggatgtttgctccaatgggcgtggcatcgatcagttccactttcgaaatgccatccgcgtcaatcagacgaatcgagctcggggaaacggtaccatcagcggccgagcgcaacgcagggaccagtgtctccaataccatcgtcgtcttaccggaacccgacacgccagacaccacagtgagacgtcctcgcggaatgtccaccaataacggatgcaccgtatgcacggtattcgtctccaaatgaatccgacccttggcgaacatcgcatctaagtcaatctgcggccgcgcccgctcatgtattttgccaccatcacgcagaaaaggcgctatctgagaaccaggtgccgtcataacatccgccaccgcaccctgagcgatcacatgaccgccttcggcaccggccgttggacccatctccaccaaatgatccatcgcggcaagcacacgggtatcatgatcgaccacaaccaccgaattgccgtcagccaccaaatcgcgcatcacgcccaacagtccatccacattcgccggatgcaatccgatagacggttcatccagcacatacagcacgcctgtagtgcggttacgcaccgaacgggccaactgcacacgttggcgctcgccggtggacagtgtcgcacctgcgcggtcaagcgacaaatagcataatccgagttccacgagccgctcggccgtatcctcgaacgattcgcagatggctgtggccatcgcacgcatctcctgcggcaatgacttgggtactgaacgcacccaacgtatcgtttcgtcaagtgtcatcgccgtggcttgtgccagattaataccgagaatctgcggttgacgagcctgctgtgaaagcctcgtaccggaacaatccggacatggttgctcgctgaggaatctcgacacgcgtttgatacccttctcatccttggctttggcgagcgcgttctccacggtatacacggcgttgaagtacgtgaagtcaagttcggcgaaatcattgcctttcttcggtttgtatagaatatgcttcttgacggccgggccgttgaacacgatgtcccgctcggcgtcggtcagctggttgaatggaatgttcgtgcgcactcccatcgcgccgcacacctgcttcatcagatcccacatcaacgatccccatggtaatactgcgccggcgtcgatgcttttggtctcgtctggtaccagggaagcacggtcgacggttcgcacgatgcctgttccggagcaggtcgggcatgcgccggcggaattgaacgacagctgttcggcggatggtgggtgcatgagttgattgcaggatgtgcatcgtataggcaactcggccgccacgttcattgtgggacggttgcgttcgccacaatgctcgcagacatgtgaggcgcaacgggagaacaacagacgcagactgttgagcagctccgtcatcgtgccgaacgtggatcgcacgccgggcactgaaggtctttgatggagggcgagagccgcgggcacatgacgtatgtcgactacctgcgctcgactcgcttgggtgagacgtcgcctggtatacgtcgacaaagcctccagataacgtcgggatccttcagcgtatagcacacctaaagcgagagagctctttccggacccggagataccggcgatgccgactaatttgttcaacggaatgtcgacgtcgacgttcttgagattatgtacacaggcaccgcgcacttcgatgcgggacggcgggaaagctccagatgattgttccatacccactacagtacctgtgtggcggaaaacacgcgggcaggggaaccctgttcgtcatggtattgctgcaattgtggtatctgatccatatattcgaccgcaacggaggggatgccattgtttttcacggctaccgtcagcgtacgtgaatcggaaggcgatgcggtggaatacggggaaatggattgggaaaggaaagaatcatatacatcgtatatatcaatgggaagaagttcgccggggagcggaaccagagtctgttccccggcgcagggcggctaacaagcgaatgcccagaacatccgcataaggcgttgatgggctcatccgccgtgtcagcgtgttgaacgatgtatcatgccgctcaacgtgatgataaggcgttggcgcccttgcctttcgtggcgagcgtcacggcgatgatggacgcgagagcgacggcgtacagtacggtgatgatcggaatcagcgcgctgtatcggtgggccgcatccgtcgcatgagagacgacgaaggatgccaactggttgccggacaatccggcgaacgcccacgcgctcaaagccagtccgtgcacggtggacactgacttcatgccaaagtgctgctcaagcagcaccggcagcgttgaacacggcatcgacggtcaggatgacgctgatgcttcccgcgatggccttggccagaccgaatcccgcgacggcgatgccggtggcgagacctttggcgaaccacagcattaggttcttcaccggcgtcagatagccgacgcccaatccaatgcccatgattacgccatagaagatgagcacgccgggggcatcctgccgcgatactggctccggtaccggcgaacctgcaggcgaagcagaccgttgagatcaaagccgatttcttgatgtccttttcgacgaagggtccaaggaagacggccgacatgccaaggatgttgattggccatgtaatattcgttcctctctgttgtttgttcgccctgcgacgaacaaacaacaagataatggtgaagtattccgtggccttgagcgtgccgggaggcggcagaagtgggtaagccgttgatttcattggattttccaacaaatgaacattgtgtatgttcaccttggggataagcatgaggaaaatctcatgtgaaccttgacacagttttcatggctcacaattcgaatgcgcgtttgatgaaggcattgacggtgttccaatacagttcgggatccacgacggatgcttccatatggcgtgcgtcgggaaccatgagcttttctcgatcgatgctcgagcacgcttcgtaattgatcttgagaaaacgtgagctcacgatgtcgtcctgttcgccatgaatgaacagcatcggaatgacagtatgtctgagcgactgcagacaggtggcttccgaaaaatcgtaccctgcataatgtttgcagaacaatcccgcggcatccacacataccgcggcaagcggtttcggcagacgcgacgaatgccgaaggctgtcgatgaacaccatgcgcgcagacgtgtagccgctatcgacaatcgcggacaccacattgcgcggcagacgcgggtctcccgtcgtcatcatcaccgttgccgcgcccatcgaaccgccatacagcaggatacgggcgtcggcgtcactcgacgcgataaggtcgatccaattcagtagatcattgcgttcaagccagcccatgccgacgtaccgtccctcgctcaagtcttgggcacgctgtgacggaaccaatacggtgaagcccatgcgggcgtaacgatgtgcccatttcgcggtttcctccggtacaccggtataaccatgcatgcagattgcgtacaggtgtggttttggcgcagtgcaatccggatcgaacagccatccatgcagtcgaagtccatcatcgctggtaatcgtcacaggctgtttggcttgcgcgaaccattctcctgcttcctgtgcctcaccctgctgaagtttttcgatacgctccggcgcaatcagcgattgatggaaaacggaacgtttccattgcgtatcgatgcagaaatggaacaggtatttcgcagtcgtagccaacgatgcgatacaggcagccgtcacggctcccgtggcgatgcaaatgtcgcgaacgattgtgtcattgtcatgcttcattgctgtctcgtttccttgcgattgacggattgttcacaattactatcgattgtacgtgcgtacggcgttttcgtgggctttgacagattttttcatttttgatgtgagacgtttttcgataatgtccgccctcgccgtatactggttaactgttgtcttggcgagggaagcgtatggcttccgtaatcgactcggcgtgtgattgtaggctccttgtgggttgattcacggctcgttgatgcgccgaaacagaatgaacgaataaaacataaggagaaatagcccatggctaccaccattaccctcgaaggcgctgcccgtaccgagttcggcaagggcgctgcccgccgcatgcgcgtcgccaaccttattccggccaccgtgtacgcaggcggcgaagagccggtcttcgtgcagctgccgatgaaggaaaccaccctgtccctgcgtcacaccaacgctctgttcaccatcaagttcggtgacgagaccaagatggccgtcgtcaaggacgttcagcgcaacccggtgaagcgcatcgtcgagcacgttgacttctacgaggtcaaggccggcgagaagatcgacgtcgaggtgccggtgttcgtcgagggcaccccgaagggcgctgccgtcgcattcgtcgacattcaggagctcaaggttcgcgccgatgtcgccaacctgccggagaagatcgtggtcaacgttgacggcctgaccgacggttccaaggtcttcgccaaggacgtcgtgctgccggaaggcgttgtgctcgacgtcgaggatccggaagagtccgtcgtcaccgtcgaggtgccggaagacgctgccgatgaggctgctccggtcgaaaccgctccggctgaaaacgctgagtgagttcagatagcttaaggaagcaaacttccatcttacggttttgaacaaccgtaagagatgatgaaaaagcccatgtgctcagacgcacatgggctttttcatactcggcaacacccgttctatgagctggaagacataagagactgacggcgcatcctgcattccttacgcaatattgatacaacgggtggatacggacgtatactcgcctatacgttcagtgaacccgtatggcactgtcgggtacgaagggagcgattgcgtactgccggagacggactgcgtgacgatccgttttcccggcagccatcctgatgccgcacattaatggactatatcgagaatcatcatttgacggtggtaggcttcccacgtgagatcacactgatcgacaatgatctgacgcaggattccagcaaatacgtggcatgcatcagcattccaatcgaataacgactagcatgactgacgatgcatggaaacaatgcacgagagacgaagtgagacggtgcggaagagagaaacatttgaataagcatattattcggcttgatgtggtgacggtggtattccttggcggatgcgtcggcacgggactgcggtatgcgagctcgtccattgcggacgtgggcggcttccatgtcggtacgttcgcggccaatatggtggcctgcttcgtatatgcggcgctttccgcatggctgggatcttccagtctgttgaaaggccgtgcaaaagaatacgtgaatcgtggattcggcatgggcatgtgcggaggcctttccaccatgtccacgctcgcattggaagaattcatgatgattgacgatcatgcgattcccggagtcctcacctattgctgcgcaacgttcattgtcggtttttcgctcgcctacgccggtgccttatgcggttcgtggttggcggaacgaaacaaagacgaacatgctgacaaggaggcgattcgatgagcgcaatgcttgcgatcggcgtatgcgcatgcggtggcgtcggcgcggccgcacgctatatctgcgattcgtatatcaaggcattgtggcgcaaaacgttcccgctttcgacgtttgccatcaatgttgtggccggtctgcttgccggcttggtggcgggattgttcgcggcgaacaccataagccccgactgccgcctactgctcgcaacaggatttctcggcggtttctcaacgttctcaaccatgatgaacgagacggttacgctcctgcgcaatgggaaaatcgcttgtttcatcggttatgctctggcttcgatcgtcgtgcccgtcatggccgttgcgtgcggttactggctggcctgagccaacgtaaacgtgattccaaaatcacgtccgaatgcagagactggcttcagtccgcgcgtagcatgcaaccacgctcggggctatgggaatcacgtataccgatgaaaagaagttcaccaaagaacggacgcagcaactgttccgatccgtcggatgggtgtcaggcaaatatccggaacgtctgtacaaggctctgatgggatcgtccaccgtgttcagcgcatgggacggcgaccgcttggtaggcttggtgcgcgtgctcgatgacactgagatggtggcttatatgcattacgtgctggtcgatccggaatatcagggtcatggcatcgcaggccacctggtgggcatggtcaaagagagatatcgcgactacctttatattgaagtcatgcaggaagaaagcaagaacgccaccttctaccagaagcacggcttctcaatcatggaagacggcgcggccatgcagatccgcaatccaggagaacgccgctgaaacaagcatcgtgacgccaacaatcttattgccccgtctaatgacgggggtattgctttttcgagtatccaccaatacatcggagggttggcttgcatgcttcacccgaaaggatcgcagcatgaccggaagcgacgaacggaacacgcagaacgcgacgagcgttgggaaggctgcgtttccagcgccttccgccatgaagtctcctcaccccaataggcgacagcggcatgttgtactacgacgtcgaaactactcgccccatcattctcacccacatcccgctgtcagagacctgaacgtcataatggtgttttggggaatgaggcacagtcattttttgaacaattcagaatacgttccgagtctatagagcatcaatcaggcgtgagggcggcgactttttcgcaggatgtttcttcctatctcatatcgcgaacgcttgtaatcgaaagagattatgatgtgggaaagttactaaccagaaccggtgccacaagcactgggataccaacaaccgcgggccgctttcgggtggctgcaacaagaagaagtaaagaatgactgaacagaatcatcacgatccggcagagcttgacaagctcaccgagaagttcaccgtgctcccgaacgacaacccggcatccgacgccaaacgtgccgaactcatcgacaagccggcattcggtcaggtcttctccgacaacatggcccacatgacttggaccaagggcgaaggctggggagaccgccgcatcgagccgtatgcgccgctgaagatggatccgggcgcatccgttctgcactatgctcaggaatgcttcgaaggtctgaaggcctaccgtcatgccgatggctccacctggctgttccgtccggatgcgaacgccgagcgtttccagaactccgccaagcgtctgtacctgccggaactgccgatcgacgatttcatcggttccgtggccgccctcgtcaagcgtgacgtgaactgggttccgacccgccgcgagtacaccctgtacatgcgtccgttcatgttcgcttccgagccgttcctcggcgtgcgtgctccgcaggaagtggactactgcgtgatcgcatccccgtccggcccgtacttcccaggcggcgtgaagccggtcagcatctgggttgaagacaagtggttccgcaccggccctggcggcaccggcttcgccaagtgcggtggcaactacgccgcatccctgctgggcgaatacaccggcatcgaccacggctgcgagcaggtctgcttcgtcgacgccgctaccaagacctacatcgaggagcttggcggcatgaacatgatggtcgtgcacaaggacggccacgtagagaccccgtctctgaccggcaacattctgccgggcgtgacccgtcgctccctgattcagctcatccaggacaacggccacgacgtggtcgaaaccatgatcgctctggaccagttgctcgaagacatcaagtccggcgaagtcaccgaggtgttcgcttgcggtaccgcagccatcatcaccccgatcggtcgtttcaagtccgagaagttcgacgtgaccgttgccgacggcaactccggcgaattcaccgtgaacctgcgcaaccagctgctgggcatccagcttggcgagatcgaggatccgcacaactggatgtggaaggtctgctgatttttcgcgactgacttatagttcaaagtccgccgaggggcggggaacatggtattcgacatactcaaggccgttcggccaagcctacggtcgaacaccatgtttcccgcccctcggcttattgtgtacgatgggaagtcgcgaaatccgagagtgagggaagtgagggaagggaaaaggatgggaaagcatgtcggtggcgttggagagtaatgccttcttttgggggattgaatatttggcgacgttctgctgcggcatgtgcggcggacttgccgccgtgcgcaaaggctacgatatcttcgcgattctcgtcaccacatggctcaccgcattgggcggaggaatcatccgtgacgtgctgctgggcatcgcgccaccggtaggcgtgtcggataaaggactggtgatcgttgctctgctggcttcggtggccgtcgcggtgtgccatcccgaaatcaacaggctcaaatggtccatgctgtcgttggatgctctggcattgggattgtatgcggtcaacggtaccagcaaagccatgatgtaccacacgtcaggcatgaccgcggtttttctcggcatgttcaccgcgcttggaggtggcctgattcgagacatgctcatcaacgaagtgccgatggtgattcgtgacaaacattggtatgcggttccatctgccgtggggtgcgtactgacggtgcttgtctgcaaaggcgtggacgctggaatcgtcagttttccagccgaagtggtgcttgatctgctgatcgtcgcattgatggtcagcatgcgattggtatcggtgattttcgacattcagcttccgggagcgttggtgcgtcataatacatatctgccaagtgaagcgaaatatttgaaacgaccggtcattcattctgataaggattccgacaaacgcaagtgtgacaagcgtaggtagcgacagtgagatggtaattaaacggaagacatttgcgtaacaaaaaatcccgcaggaaaaacctgcgggattttcgttagctgtgagcttctaaaactcagagagcgttgatggccacggcaagaccggacttgcggttagcagcctggttcttgtgaatcacgccagcgccagcagccttgtcgagcttctgagctgcgaccttgtaggcggcttctgctgcggacttatcgccggcggcgatagcttcacgggtggcgcgaacggcagtcttcaggctggacttcacggccacgttgcgcttgtgggccttctcgttggtgagaacgcgcttcttctgcgacttaatgtttgccactatttctccaaacgacgttttctataaggacatacaaacgatgatgataacatggcgcgcggataaattgccaacgggcttaggagtgtcgcgactcaccatgccgatactagcagttagaatcgtttgcgtcgaatatttcaagaggaggatggcgtgggccagcagcataaccagcccggtttcaccgatcagtcgttgattcgcaatttctgcatcatcgcgcatatcgatcacggcaagtccacggtggcagaccgtattctgcagctcagcggcatcgtgcccgaacgtgagatgcgtgatcgtttcctggatcgtatggatattgagcaggagcgtggcatcaccatcaaatcgcaggctgtgcgcgtgccgtggacgttcgacggcactgaatataccctcggcatgatcgacactccaggccacgtcgatttcacttatgaggtttcccgcgctctcgccgcatgcgaaggcgcagtgctgcttgtcgacgcgacgcagggcatcgaagcgcagaccctgtcgaacctgtatatggccatcgaccatgatctggccatcattcctgtactgaacaaaatcgatcttcccagcgccgagccggacaagcatgccgaggaaatcgcaggcctgatcggatgcgatccttccgaagtgctgcgcgtatccggcaaaaccggcgaaggcgtggccgaactgcttgaccgtatcgttgccgacgttccggcgccgacggggaatccggaagctcccgcacgtgcgctgattttcgattccgtctacgactcttaccgcggcatcgtcacctacattcgtatggtcgacggcgaattgcgttcccgcgagaaactgcacatgatgggcatcggcatgacccatgatccgattgaaatcggcgtgatcagcccagacatgatgcctacaaaggcgcttggtgcgggtgaggtcggttatgttatcaccggcgcgaaagacgtcagccagtccaaggtgggcgacaccatcacttccgcgctcaagcctgcggccgatccgctcgaaggctatcgtgacccgcagcccatggtctacgctggcctgttcccaatcgacaacgcgcagtatccggaacttcgtgaggcgctcgataagctcaagctcaacgacgcggctttgatctacgagccggaaacgtccgtggcgttgggcttcggtttccgctgcggcttccttggcctgctgcatatggaaatcgtgactgaacgactgagccgcgaattcgatctcgacttgatctccaccgcaccgaacgtgccatacgaggtcaccgcggaagacaattccgtgcatcgtgtgaccaatccgagcgaattccccgacggcaagatcaagcagatcgtcgaaccggtggttgccgccgacatcatcactccgaaggaattcatcggcgcggttatggacttgtgccaggaccatcgtggacagatgggcactatggaatatatttccgccgaccgtgtggaaatgcattatcgcattccgttggccgaaatcgtgttcgacttcttcgaccagttgaagagccgcaccaagggctatgcgtcgctcgactaccatgaggacggcgaacaatccgccgatctggtgaaggtcgatattctcatccaaggtgagaaggtcgatgcgttcagcgccatcgtgcacaaagacaaggcgtattcctacggcgtgatgatgacgaagaagttgcgtgagctcattccgcgtcagcagttcgaaattccgattcaggccgccatcggctcccgcattatcgcacgtgagaacattcgcgcactgcgcaaggacgtgctcgccaagtgttatggcggcgatatttcccgtaagcgcaagctgctcgaaaagcagaaggccggcaagaagcgtatgaagatgctcggccatgtcgaggtgccgcaggaggcgttcatcgccgcattgtcgaccggagacgcaggcaacgaccgcgacacaaaagacaagattcgcgccgcccagaaaaccgaaggctgatgttcgaagcctacattcatgtgccgttctgtatacggcgctgtgggtactgtgatttcaacacgtataccgctgtcgacatgggagcgggcgcttcgcgtggcaattacgccaatatggtgattcgcgagatgtcaatcgtccatgattggcagatcgcgcatggcgttaacgaaccggaagcggacaccgtctttttcggcggtggcactcccacgattctgaaagcctcggatctggtcgccatgttgaatgccgtgcgtgacacgtggggcattgccgacaatgcggaaatcaccaccgaagcgaatccggacacggtgaacgccgattacgtgaaggaactcgcggacggcggattcaaccgcatctctttcggcatgcagtcggctgtgccaagcgtgctgaaaacattggatcgtacgcataccccggccaatgtggcggcgggaatcgcagcggcaaatgctgccggcatgcgttccagcgtggatttgatttacggtgcgccgggggagagtctcgacgattggcgtgtttccgtacgtacggcgatcgacttgggtgttgaccatatttcggcatatgcgttgaccgtcgcaccgaacacgaaaatgggacgtcagattgctgttggaaccttgcctacgcctgatgatgacgatgaggcgaccaagtatgagattgccgacgatctgctgagcgcagccggtcttgaatggtatgagatcagcaattgggcacgtcctggttatgaatcgcaacataatcttggctattggcgtaatgttgattgggcggggctcggtcccggtgcacacagccattacggcaatgtgatggatgttgaacagtccacgtcggctgaaacatctgaaacggtcaaatcgtcgggcttgcgcagctgggatattgcgcatcctcgcatgtgggggcaggctatcaacgatgataatgtgccatggtcgggaagcgaacgaatctccatcgaggagaacctcgaagaaatcatcatgcttggtctgcgcatacgtgagggtctggatttgagtcgccttggaaacatggttgatatggctcgcatccagcccatggaagacgaaggccttatcgttatccgtgacggacgtgtgattccaacccgaaccggacgcttgctcaacgacaccgtcatcgagcgtttcttcgacgcctgctcgttgtaatgccgataatcctctgacgaattggttttagatgatccatcttggtatgggtggatacagtgtgcagattgaaacgggcctcggatgcaggttgttgcattctaggcccgatggcatagagcctcgaacgaggctctcaccggatgttcgtaatcagcgcatcgtgagtccgccatcgacatgtaacgtctgaccggtgacgaaacgagcgtcctcgccaaccagcatcgccacaacgcccgcaatatcatcagccgtggcaagcctgcccaaaggcgtctgcgcgatgatgcgctcgcggacgtcttcggtggtggcacggctcgaatccgtgcccacggtcaaaccggccgcgatggcgttcaccgtgacgccccacgctccggcctcctgcgccagtgagcgcgtgaatccgatgagtgctcctttggctgcgatgtagtcgtggtaggggacgatcgggctgtctacgaggttgctggagatgttgacgatgcgtccccatgattggcgtcgcatgtagggcagcgcggtcgtgcaggtgttgtaggtgcctttgagacatccttcgagttgggtcgcgtagtcgttccagctggtgttgctgaaggtgttgcggttgcgtgggtcgaacgagtagtggctgagcgcgttgttgatgaggatgtcgatgccgccgaaggtgttggctgtggtttgtgcgagttcgttgacttgggtttcgtcggtcacgtcggctttgcatgtgatgacgcgtccttgtgcgtccgcttcgttttcgatgtgttgcttggtgtgttgggcgcgttcgtcgttgcttaggtagtcgatggtcacgttggcgccgagttgtgcgagtctgagtgcgattgcggcgccgatgcctcggcttgcgccggtgatgatggcggttttgccggtgagtgtccggtgttcggattgctggttcacgtaaggtcctttgggattattcgtagtcaatgtcgaaggtgtcggcgtaacggtcggtgttgcgttcgatgtcgacggctctgacgaggtcgaggatgttgaatccgccgtcgtggtgccatccggatttcgcgcggttcatttctccgacggggcagatgcggtcgatgccgtattcgcccacttgttgcgcgagtgcgaacagtctggatgagcttgtggcgatcgcgcaggtttgcagccactcgcggtagggtttcagtgtgggcagcgcgtgtttgagttggtccacggcgacgatgttaatggtgcggttgagcggtgtccccaacgaggggagactgctggtattggggtagtagagcacggtccagtcggtgccttgcggcgattcgatgacgaacggtgcctgtgggtcggcctgtgcggcgctgtctggagtcatggacgtcatgaacagcgcttgcatctcggtttgagagcgtgccctgcggatggcgagggattccgtgtcggaaggggttgatcgtggatatttgcgttgttgcgagtcgagttcgctggcgagcagttccgccgtctgagcgggggagatggctccgccgcgttccacgaagatggtttgcggtgccaggcagctttgctggtcgtaggtggccacgtccacggccatacggtgcacggtttgcacgtgagtgtccgcgcgtagcgcttcacgtccgatgaatgagaagccgatgcgtgcgccatagctgaggaacggtttgcccgcgctcacgcgtggacggatcgcctcggtggcgtgcgacgaaccgtaggcgatcacggcgttcgcttcgccgatcgccacgtcttcaagctctaccgtgccgccgcgccacggcaccacggccaaagcgtcagcaagatccggatcgatttgcgccaaggagcgcgcgaagagtacgggcatcagcggttcgtcgaacgatgatttgccgatgagcgcgcttttcgtcagcagactcatggtcatgctccatacgggaatgccgggaacattgctggaaaacacgtggaatgtcaagtccggcccgtacaggcgcgtgtatccgccggacttgttcggtcggtattcgtccagcatgcgcgggcttggcagttcgtcatcaagaaaacgcaatagttcgcgtctgcggaacatgcgcatgtaacgtttcaattcgatacgcgtcatcgtcgcgtcatagccggtgatggagggaatcagagactccgctatctggcgaccctcataatcgggattcgtccacaattccaccgcctcgccgatgatgtcgacgatgtgttcgacggaatatgctgccaatgtctgcgatcgattgcaacgcgttgtctcgcacaaatcttggacagtctcaggcgtgagtaccggataacgcaacgtgacctcaccgcggtcggtgagaacgccgcgtgtttcgaaatcctcaaatatgaagccgcgcggcgcatggaaaatgtcgatgacgctcatgcgtttgccgccatcacctcgtcgacggcgatggagcagccgcgtgcctccgcacccttcgcacgaccgttgagctcgtaaccggaatcggtgcgcacgccaagatcttcggtcagaatcgccagacaggaattccaattcgccaaatcgtaatgcgcgatcaccccctgctcgccatcggcgacaggcgtgagcgtcgccggatcgaggaacacggaacgaacccacgacggcgtcgccttcagataattcgacgaaccatccgtatagtacgacagcagattctgatcgtaaatctgcgaactcaactccgtcataccgtacatgttcacgcaatgcgtgcgtgcgacgccaaacacctcaaggaacttcgcatacaaatcatcgacggtcatatcggttttcgtactcttgaaaccaccggtatcgaaaacacgcgaatccttcgccaacgcataggttttgccccgctcggcaagatagtcaagcagatacagatacgcggacgaagcgcccatcagcatcaccggctcgccgtccgccaccgactgatcaaggaacttttccacaccagcgaagtccaaaccatcctcatggaagaagaagccgctgccctcgctgccgcactgctccaccgcacgcgtcagataacgggccaacgaaccattatgattcatctcccaggcaggggagagcaccgcgatacgcatgcgctcacggtcaggcatgatgaaatgacggaacgggccgatcatcgacgcatcccacacctcaagatcaggatgatagttgcgtccacgctgacccggatgcgtagtgccgctggtcatgaacactgcctcgcaatcatcttcaggcaccgaagtgagcgtcagcatcttgaacccatccaccggcatcggcggaatatccatccaatccgacaacatctgcggagtcaccctacgagacatgcaatacgcgcgatactgcatgttatgggcaaactggaaagcgaaaatcttatgtgcgagcgcgtcgaacgcctcatccggagcgacctcgcaaccatacttttcgatgaactcaagcacgtttgccttgacttcctgcgcgtcggcacccaacgacattgatgtcatatgcggtattcctttctataaacgatactgatattcgaaagcaaatcagatctgcgacggaacttcagcttcgctgtttcctttacgacgattgatcagattcggcaggtcgatcagcagtgccttgagaatcaccacacagaacgccccgaccagaatcgaattggagaagaacacgtgagcgccgccctccaagccgctcaacgcgctcggcagcgcgatgcccaacagcagggacaatccaatgaccgcctgggaacggtcgttcgactccaccttgcgcagcgtattgaagcccgtgctgatcaggcttgccgcggccggcaggaaaatgccgccgatcacaggggaaggaatcaacgacaataccgctccggccttcggaatgaaaccaagaaccacaaacaccatgccggcgatgatcaccggcacacgggtacgggtcttgccctcatccgtgaccttaagcaacgcgacattctgcggatacgcggtagtggtgaaaccgccgatcagcgaagaaattgcggaaccggcagcctcgccggccaaaccataacgaacctgacgatcctcaagcttgacgccctggatctcactggccgcctgatacacgccaagcgcctccataatcgcaaccatatacgcgatgaagaacggcacaaacaccgccgcatcaaagtcaaaaccgccatacggcataatctgaggaagaccaaaccaaggcttcgacgcgacaccggaaaaatcagccatgccaaataccatcgaaagcgcagtgccggcaaccagagcaatcagataggaaagcgccctgaccatacccttgccgaactgggaaagcgccaccaccagcacgcaagtcacgatagacacggccaacgtcttcggatcggcaaaaccatcatcgccgggagcgccaccaagaaactcgctcaacgtgaaactcgacagcgaaacgccaaccagaaaaataatcacgcccgacaccatcggcgcgaacagaaaacgcatcttctcaatcacacgggtcagacacagcaccaagaaaatcagcgaactgacaaaaatcgacgtaccagcggcagccaacgaaccagcagtgcccgcagcgatcatcaacgcatcgaacgcggcggacggaccctgcacaatcggcaaacgcaccaacctcgtggcctgaatcaatgtgaccaaaccagacacaatgaaaatggcattcaccatatttgacgacaacgccaacggcaagccaatggcaccagccacaaacaccggatcaagccacacattggacaccaacacatgctgcaaacccagcagcacattcttcggagtcaacttcttcgaacccgaaccaagctgctcaggcacctgcgacgcatcagacacgccaaatcccttctctttccacgaaacacacggccaaacaccagccgtcagcacagagaagacgcgcacgcgcaccgttcgtaacatccctacgcaggcactaccctgttcaggtcataagggtccgggcaaacgcccatctcagccacatcggctcccctgtactcttcggacaaccaccagcataacgacacgcatcgataccggcaaccaccacaacccaacacatatcctccacattttcccaagaaaaacagtcttgacttttccgagtattcgttatatggacacgcgaaacgtatttgatacaggggcgcggtattctaaaccacgcattaaagaaccgcaagacttttcttgcccaaaaacattgaaggtggtttcggtgactttccacgccccgttagatctcacgatccatgattcccaaggtatgtacgatcccggcgccgagcacgacgcctgcggcgtgggtatggtcaccaccctcaacaagcgccccgaacgcaaaatcgtcgacgacgccatcgaagtgctcgtcaacctcaaccaccgcggagccgtaggcgccgaagaaaacaccggcgacggcgcaggcatcctcatgagcatgcccgacgaattcatgcgcgccaccgcaggcgtcgaactgcccgaagaaggccactacgccgccggcatcgcattcctcgaccgcgacatcgccacctccggacaacaagaacaagccatcgccaaaatcgtgcgcgaagaaggcctcgaagtactcgcatggcgcgtcgtacccaccaacccggacggactcggactgcaggcgctcgccagcatgcccgcgttcaagacgctggtcgtggccgaccccgaaggccagctcgcaggcatcgaactggaccgcaagaccttccgcatccgcaagcgcgtcgaacacgaggtgggcatctacttcgcgtccctgtccgcacgcaccatcacctacaagggcatgctcaccaccatgcagctcaagcccttcttcctggatctttccgacgagcgcatgaaggcgaagatcgccatcgtgcactcccgcttctccaccaacacgttcccgagctggccgctggcccagccgttccgccagctggcccataacggcgagatcaacaccatccagggcaaccgcaactggctgtccgcacgtgaaggccgcctaagctccgaactgctcggcgaattcaagccgctgctgccgatcgctaccccgggctactccgattccggcacgttcgacgaatgcctcgaactgctgcacctgtccggacgttccatgccacatgccatctccatgatgctgccgccggcatgggagaagaacgaccagcttgaccccgatgtcagggcgttctacgaatacaacaatacgctgatcgaaccgtgggacggtccggcgcacatcatcttcactgacggcacccaggtcggcgcgctgctcgaccgcaacggcttccgccccggccgctggcagcttaccgacgacggctacatcgtgctcgcatccgaaaccggcgtgctcccggagaacgccgaggaacacatcgtgtccaagggccgcctggaaccgggcaagatgttcctcgtcgataccaaggaaggccgcatcatcccggacgaggagatcaagaagtccctcgcgtcccagcatccgtaccgtcagtgggtcgaaggcaacaccgtcgagatgagccagctgcccaagcgcgagcacgtcaaccactccggccagtccgtgcaacgccgccagcgcgccttcggctacaccgaagaggatctgaagctgctgctcgccccgatggccaacaccggcaaggagccgctcggatccatgggcaatgacgcgcctatggccgcgctttcctcccgcagccgcatgctgttcgactacttcacccagaagttcgcgcaggtcaccaatccgccgctcgactgggagcgtgaaaagatcgtgacctgccttgaatccgccatcggtcccgagccgaacctgctggccgattccgaactgcatgccaagaagatcctcattccgttgccggtgctcaactccgacgagatggcgcagctcaagcgcctcgaccgcgccaagatcctcggcggctactataagccgttcgtcgtcaagggtctttatcaggtcgctggcggcggcaaggcgctgaaggaacgtctcgacgagatcttccaggaagtcgacgaagccatcgaaaacggatccaacttcctcgtgctctccgatcgcgactccaactacacgtggggaccgattccgtcgctgctgctcacctccgcggtgcagcaccatctgctgcgcagacacacgcgcacccagatctccatggtcgtcgaggccggcgatgtgcgtgaaatccaccatgtcgctctgctgatcgcctatggcgcggcggccgtcaacccgtatctggcgttcgaatctgtcgaagacctgtcccgcaagggctatctcaacgtcgatgccgaaaccgcggtgaagaacctgaccaacgcgttgtcgaccggcgtgctcaagatcatggcgaaaatgggcgtctccaccatcatgagctaccgtggcgcacagctgttcgaagccatcggcctgaacaaggacgtcatcgacgaatacttcaccggcaccacctcccgcgtcggaggcgtcggactcgacgaactggccgaagaggtcgccatccgccatcgcgtggcctacccgtcgcagtggaccgcccgcccgcaccgcaacctgcgcaccggcggcgaatacaagtggcgtcgtaccggcgaagaccacctcaacgaccctgaagccatcttcctgctgcagcagtccacccagcgcggtgactacgacatgttcaagaagtactcggcgcacatcaacgacacctccaaccgtttgatgacgctgcgcggcctgatgaagttcaagtccggtcgcaagccgatcgacatcagcgaggtcgaaccggccagcgagatcgtcaagcgtttctccaccggcgccatgagctatggctccatctcccaggaggcgcacgagaccctcgcgatcgccatgaacaccatcggcgcacgttccaactccggtgaaggcggcgaatccgaagaccgcatcaatgatccgctgcgctacagcaagatcaagcagatcgcatcggcacgtttcggcgtgaccagcgactacttggtgcacgccaccgacctgcagatcaagctcgcccaaggcgccaagcctggcgaaggcggacatcttcctggcgccaaggttccgccgtggatcgccaaggtgcgtcacgcgactccgggcgtcgagctcatctccccgccgccgcaccatgacatctactccatcgaggatctgaagcagctgatcaacgacgcgaagatggccaatccgaaggcccgcgtgcacgtcaagctcgtttccgagttcggtgtgggcaccatcgccgcaggcgttgccaagtgccatgccgacgtggtgctgatctccggttacgacggcggcactggcgcggctccgctcaacgccatcaagcacgccggcaccccgtgggagatcggcctgtccgaaacccagcagacgctcgtgctcaacggcctgcgttcccgcatcaccgtgcaatgtgacggcgagctcaagacgggccgcgacgtggtgatcgcagccctgctcggcgccgaggaattcggtttcgccaccgccgcgctgatcgtcgaaggctgcgtcatgatgcgcgcctgccagaagaacacctgcccgcagggcatcgcaacccaggatcccgaactgcgcgcacgcttcaagggcaagccggaacatgtcatcaacttcttcatgttcatcgccgaggaagtacgcgagctgctcgcccagctcggcttccgcaccttggaagaggccgtcggccatgtcgaatgcctcgaccagaacgaagcgatcaagcgttggaagtctgacggcatcgacctgagcaacgtgctcatgcagccgggaccggtgccgggaaccatcctgcaccagaccatcgagcagaaccacgagctcgacaaggcgctcgacaacaagctcatcgagctcgcgcagcccgcccttgagaagaaggagccggtgcgcatcgagatgccgatccgtaacgtgtaccgtacgctcggcaccatggtcggctacgagatcaccaagcgttacggcgaggaaggcctgcctgacgacaccatcgacatgacgttccatggtgcgggcggccagtccatcggcgcgttcattccgcgtggcgagaccatccgcgtgtacggcgaagtcaacgactacgcgggcaagggactttccggcggacgcatggtcgtgcgtccggaggcgggcatcaccttcgatccgcatgagaacgtgatcgcgggcaacgtcaccggcttcggtgccacttccggccagatgttcgtggcaggtcgtgcaggcgaacgcttcggcgtgcgcaacggcggcgccaccttcgtggtggagggcgtcggcgaccatggttgcgaatacatgaccggcggcaccgtcgtgatcctcggtcccacgggtcgcaacctcggcgcaggcttctccggtggccacgtgtacgtgctcgaccttgacatgaagcaggtcaacccggctgccgccgccaacggcgcgttgctgttcgaaccgctcgacagtgagtcgaacgaaatcgtgcacggtctggtcaagcagcatgccgaagaaacaggctccgcattcgcggccggactgctcgccgactgggagaacgcatccaagcgattcacacacatcgttccgaagcacttcctcgccatgcagaaggcgatgaagaacgccgaagagaacaacatcgatttcaatacgcccggcgtctgggaacaggtgtacgagcaggttatggaaggagcgcgctgacatgggagatccacgtggattcctgaaggtccgtacccgtcgcgaactggccgaacgccccgtcgaggagcgaatcaaggattggttcgacgtccacgccgaatccggcctgcagccttggaccaccgaacaggcggcccgatgcatggactgcggcacgccgttctgcatgagcggctgcccgctgggtaacatcatcccagaattcaacgatctggtgcgccaggagaagtgggaggacgcgtacaaccgcctgtccgaaacgaacaacttccccgaagtcacaggccgcatctgccccgcgttgtgcgaggcagcctgcgtgctcggcattcaccagccgccgaccatgatcaagaacgacgaatgcacgatcatcgatcaggcttgggaactcgactacgtcaagccattgcctccgcagcgcctgaccgaccagaccgtcgccgtggtcggctccggcccgtccggtctggcatgcgcccagcagcttacccgcgcaggccacaccgtggtcgtatacgagcgtgatgacgccatcggcggcctgatgcgctacggtatcccgaacttcaaactcgacaagcgactcatcgaccgccgcgtggaacagatggaagccgaaggcaccgtgttccgcaccggcgtggagatcggcaaagacatctcatgggacgatctgcgatcccgctacgatgccgtggtcgtcgccatcggctccaccgtgccgcgcgacatgaagattccgggccgtgaactcaagggcatccactttgccatggaattcctgcccgacgcgacccgccgcgtctacggcgtcaagccagtcaacgacatcaccgctgaaggcaagcacgtcgtgatcatcggtggcggcgacaccggatctgactgcctgggcacgtccatccgccaaggcgccaaggacgtcactgtgctgcagatcatgccgcaggaaccaagcgaacgcccggccaaccagccatggccgaccttcgcgcgcctgtaccagaagacctcctccatggaagaaggcttcgaaacccagcgcgccgagtacgtgtacagcacggattctgtgaacttcgtcggtaccgaagaggaacaggccaaggtgaaggtggagcactccaccgctactgaaggcttcgtggccgatgagaacggacatgtgaccggtctcaaggtagtgaacgttgcacccggcgaaaacggaccgttcacccgtcagcccggcaccgaacgcgtgattccggctgatttggtgctcatctccgtcggcttcctgcacccggacaccaccacgctcgtggaccagctgcccgtcgaccttgacggacgaggcaatgtggcgcgcaacgacaagttcgctaccagccaggacggcgtgttcgcctgtggtgacgccggacgcggtcagagcctcgtggtgtgggccatctccgaaggccgttcctgcgcggccgccgtggacgaatacctcaccggcgccaccgaactgccggcacccatcgtcgcatccaaaaggccgatgatgctgccgcgctgaacataagcagttaacgtaacagaaaaatcgtccgattctccgccaaaacggaatcggacgatttttcatatccccacttcccggaacctcgaacaatacagacgtggcataaacgtccgaatgacgtgccgttcggcgaaaaaccggcagtcatgcagtaaagtgaactgcagcacatcgcaacaaaggagtgacccaatgccaaatcgtgcagaacgtcgagcgcaggcaaagaacaaccgcaggggagtgccgcagcagtacgaccaaacccatggccgcgcacgttccggaatgctggacgaataccagctgcaggaaaagtcccgccgactgcaagacggtaccgatggaccttggaagccgaccggcggcaccatcgaagaaaccgaaagcctgctgaccaccagcccgaactacacgaacccgaagatgttcaaggcaccgcattccgcacgccaatggttccgcgtgatcagctggctgctcatcgcactgtccgcaatcgcattcctggtgatcatgtggctgccgtcacatcccatgtggttggtcgccacggtctccatcgtcttcgctgtcggtgtgcttagcctgttcttcacggcgggtaacccgaagcataatccgaacctcgatcagaatggtacggccgtctgatagcaaggcgatgaacgtaaagcggggctgcatccgatggaaggatgcagccccgctttcacatgcgagtcacgaatgacggcactattcgttcctggtttattgacctccttgcctgcatttttaggaaagatgcaaaactttgtgacacgaatgaaacaatcaggcgtttcattgaaaaattgccttacagtagtgatggaacaactgcctgactcgaagaggagagcacagatatgaaggttgacatcctttcccgtgaatatccgcccaaggtgtatggcggcgcaggcgtgcacgcggaggagctttccaaagttctggcggaacgcgtggatgtgacggtccgtgcgtttgacggaccacgtgccgagaatgagattcccgaaatcccgggtgacaatccgaaaggttcgctcaaggtcgtcggatacgacgttcccaaggaactccaggaagcaaacggcgcgctgaagacgttcggcgtcgatctgcagatcgccgacgatgtggacgccgacatcatccacgcgcacacgtggtatgcatgcttggccggataccttgccaagatgctgcacggaacgccgctggtcatcaccgcgcattccctcgaaccgttccgcccatggaagcgtgaacagctgggtggcggctacgatttgagctcgtgggccgagcgtgacgcatacgagcatgccgaccgcgtgatcgccgtgtccgcaggaatgcgcgaagacatcctgagcgcctatccgaatcttgaccccgacaaggtggtcgtggtgcacaacggtatcaccatgagccagttcgaaaccccatccgacgacgatccgggctggaaggtgttcgaacgctacaatatcgaccgcaacaagcccacgctgctgttcgtcggacgtatcacccggcagaagggcctgccatacctgcttcaggcgttgcatttcgtcgatccgggcatccagatcgtgctatgcgcgggcgcgcccgacactccggagatcatgaacgaggtcaaaaccgcgttcgccaagcttgacgaggagcgcggcaacatcatctggattgaggagatgctgccgaagccggagctcaacgcgcttgagcacggttgcgacgcgttcatctgcccatccatctacgagccactcggtatcgtgaacttggaggccatggcgtgtggccttccggtggtggcctccgcgaccggcggcattcccgaagtcgtcgtcgatggcgaaaccggatatctcgtgcctgtcgaccagctgcacgacggcaccggcactccgaccaatccagacaagttcgtgcatgacatggccgacgctatcaaccgcatcatggccgatcctgaaaaggcgaagcagatgggacaggccggttacgagcgtgcgcgcgaccacttcagctgggagtcgatcgccgacaagaccgtcaaggtctatgaagacgtgcttgccgagcagggcaaaaccgccgaataaccagttcaccacgtagacgatgcgtggaacgccttccgctgaaagcattatgctggcggaaggcgtttccatatctacaagccgaacaacgataggggaggaagaatgccggagcagaacatcgcactggaactcgctgacgtggaatttcgtcgccgtggacgcgtgattctcaccaaggtcaatctgaaaatcaacaagggcgagaaatgggtgctgttcggacccaacggcatcggcaaatccagcttggttcaaatgatgagcaccagaggattcccgtcggaaggcaccgtcgacattctcggcaatcgcttgggcaaggtcgatgtgttctcctatcgcaaccgtatcggtttgagctccgcggaactgagtcgcgcgttccctccccaagaagatccgctcgacgccatcgtgaccgcattgaccgcgaccaccggccgttggcgcgacacctacaccgacgaagactatgccaaggcgcgttccctgatgcgtgaattcggtatcgaatatctcgaaggtaaaatgatgttcaaactttcggaaggcgagcgtacgcgcgtgctgatctgccgtgcgttgatggctgatccggatctgctgattttggacgagccgactaccggtcttgatttgggcggtcgtgagattgcgcttcgtgcgttgagccgtgtcggcgccgagcagtcggatcgtgccgtggtgctggtgacgcatcgtcttgaggagattccgcagggattcgaccatgtggcgatcatgggcaggatcaccggcagcgaggccgacgcctacgccgacaatgtcgcaggcaacgatccggctccgggcaccatcgtgtactcgggtgatctggaacacggtttcacttcggaacggttgagcgaagtgttcggtttggagcttgaggtgacgcatgcgaatggacgttggagcgcgtacgcgcggtaacgggtgctgtgtgcgccggaatatgctgtagcatgaatagcgtcggacaggagtcattcggttccgtgctgtcgtgatggtggaatccgtgtgggtatgaaggagtgattgatgcgtcgaggaccgttgacggcgggtgagaaggtacagttcacggatcgcagatccaataagatcaccgaccaattggtgccgggcggtgtgacgcagacctcgcacggcatcattctgcatgacgatgtgatcgggcagtcggaagggtccgtggtggtgacggtgagcgccaaacgtgaggcgcagatcaatcaggatcatccggaacgcgacgccaacaagccttggaagggaacgcgcgccattggcggatggcagttcgcggtgatgcgccctcggttggccgattatgtgctgtcgatgcctcgtggcgcgcagatcatgtatccgaaggacattgcccaagtgattcagcttggcgacattcgttccggcatgaacgtgttggaatccggtgccggatccggcgccatgagcgtcaacctgctggacgcggtgggggagcgtggaagactgaccaccatcgagatgcgttcggaattcgcccgcgtggccgaagcgaatgccacggtctatttcggtgggcgccccgcatggtgggatctgaaaatcggtgatttcgattcggtcgccgccacattgccggagcattccttcgaccgcatcatgcttgacatgcttgacccctggaaccgtcttgagcaggcataccgagtgattgcgcccggcggtgtgctcgtggcgtatgtgaccactactacgcagctaagccgtatggcggaggcgttgagggaggctggctgctggacggaaccggatatccaggagactctggaacgcgactggaaggttcagggattggcgatacgtcccgaccatcagatgatcggacacaccggcttccttatggtttcgcgggctatggcgccgggatttcaggcgttgcgcaagcgtgaccgtgccacgaaagacacgaccaccgatattgattcgctgagcgccgaagaacgtgccgaacagctcgaagatcttgagttgcgggatatttccgatcgcaagttgcgtaaggtgctgcgtgatctcgacgcgcaggtcgaggctatcggcgattgatacggtgtttcttgccgttgttctgagacaatagtcatagcgcgttgcgttggtacatacgctggatcgttaaggattggagcattcgtccatgggaacgagcctcaagaaggttgcgaaaaaagccaaggattacaagtatgtgttgctggtgatgcgtcacgccaaaaccgagccgtttggtgacggtggcgacgccgggcgtgagctgaccgacaaggggcgtaagcaggcgaaagccgtcgccaaaggcctggccgcgcacaagatggtgccgacgcgcattgcgtgctccagcgccaccagggccaggcagacctgcgatcgcatgcttaaggtgttcggcgacgacccgaaggtcgactatcgtcagagtctgtacgaaggtggggtgcagtcggtatttgacgagcttgcccagaccaaggagaagcatcgcgagctgttggtactcggccatgagcccactgtgtcgatcgcatgccaatggctggcgagctccgaatcggatgcaatgctgctcgacatgctgaatctgggcatgtcgccggcatcgctcgccgtgttcggatcaaatgagccattcaaccaatggcagctgcacagtggcgaactcatcgcattgctgacggccaaggattttgaatgattccttcgcctctcggcatgatgctgagaggcgtgaaatgttgccatgccaactgatataaatcgtgcttatagcgacacttaaattttcttgatgagttatagctggcgatttcgtggtagcttgagcgggttgcattgttcatatcagatggaggattcatgtccgttctcacttccgtctccggtttccctcgcatcggccagaaccgcgagctgaagaagattatcgaagcttattggaagggtgtcgcaacgctcgacgacgtgcgcgccaccgccaaggagctgcgcgccaagcattggaagctgcagcaggaagccggaatcgatttgattccgagcaacgacttcagctattacgaccaaatgctcgacactgccatcctgctgaacgtcattccgcagcgctaccagcgcctcgccttcgacaatcccgaagagacgctgttcgccatgggccgcggctaccaaggagacaagggcgacgtcaccgcgttgccgatgaagaagtggttcaccaccaactaccactatctggtgccggaagtcgacgaagccaccgacatcaagctcaacagcaccaagccgttcgacgaattcaacgaggcgaaggcgctcggcatcaccaccaagccggtgctcatcggcccgtacaccttcctcaagctcgcccgcaatccgcaggccgaagaactcgaatacgacaagggcctggtcaacgcggtcgccgccgtctacgccgaggtcgtggccaagttcgccgagctgggcgccgaatggatccagatcgacgaaccgtacctcgtgctcgacaaggagccgggcgacgtcgaactgttcaagagcctgtacaccaagatcctgcccgcacgcgacggcaagatcaaggtgctgctcaacacctacttcggccacatcgccgacgtgtatgagacagtcaacctgctcgccttcgacggcatcggactcgacctcaacgaaggcaaggacgagaatctcgccgccgttgaaaagttcggcgtcgcagagagcaccaccatcttcgccggtgtggtcaacggccgcaacatctggcgtaacgattacgccgtcagccttggactcgtcgacgcgctgaagaaggtcaccgacaacgtggccgtctccaccgcaagctccctgctgcatgtgccgttcagcaccgaaggtgaagacggtctcgccgatgatgtgcgcaagcatttcgccttcgccgttgaaaagctcggcgaactgcacgacctcgcggttctcgccgacgccagcgaggaagacaagaaggcatccggggcattggcagccaaccaggcgctcttcgacggtacccgcgtcgccgccgacaagaacgtggcggaacgtctcgcagccctgaccgactcggacttcgtgcgccagccggcacgtgccgaacgtcagaaggcacagcgggaggcgttgaacctgccattgctgccgaccaccaccatcggatccttcccgcaaaccaaggaagtgcgcgccgaacgcgccagactgcgcaagggcgaaatcaccaagactgaatacgacgaatacatgaaggcgcagatcgacgcctgcatcaagcatcaggagcagatcggccttgacgtgctcgtgcacggcgaattcgagcgtaacgatatggtcgaatacttcggccagaacctcaacggtttcctgttcaccaagaacgcttgggtgcagtcctacggcacccgttgtgtgaagcctccgatcgtatggggcgacgtgtcccgcgccaacccgatcaccgtggaatggagcgcctacgcacagtcccgtaccagccatgtgatgaagggcatgctcaccggcccggtcactattctcaactggtcctggccacgcgaggacatcacccacgagcagcagacccagcagctggccctcgccatccgcgacgaagtgctcgacctcgaagccgcaggcatcaaggtcatccagatcgacgaggccgccctgcgtgaaaagctgccgctcaggaagaccgactggcacaagaagtacctcgactgggccattccggcattccgactggtgcactccgcggtcaagccgaccacgcagatccacacccacatgtgctactcggagttcaacgacatcatcaccgacatcgacgccatggacgccgacgtgatctccttcgaagcctcccgcggcgatctcgtggtgctcgacgccattcacgacgccaacttcgaaaccgaagctggcccgggcgtctacgatatccactcgccgcgcatcccgtccgaagccgaaatcgaggaacgcatctacgaaatcctcaagaagatggacgtcgaaaaggtgtggatcaaccccgactgcggtttgaagacccgcggcaacgccgaaacctggccaagcctcgaaaacctcgtggccgcagcccaggctgtgcgtgccaagctgaccaaataaggcgaaacgttaggaacaagacgacagccatgcattcgccaatgttctcgctcgaggtgttccctccgaagcgaacctcccctgtaggcaccatctacgacacgttggatggcctgcaggggttggaccccgatttcatttccgtcacctacggcaccggcaaatcatccgaccgtacattgaccgcgcgcatcgcccacacggtaagcgaatacggcatccccagcgtggcccatctgaccgcgcagtatctgaacaaggatgacgtcgaccaggcactcgacatgttcgaacaggccaaggtctccggcgtgctcgccttgcgtggcgaccgcatcgacggtgccgaaccggcaggagtattcgaacatgccagcgatctggccgtatacatccgccagcaacgtccggacatgaaaatctacggcgcctgctacccggaaaagcacccacagtcggcaacgctggaagaggacatcgacaatctcaaaaagaaagtcgatgccggcgtgacgcatctgatctcacaactgttctacgacaacgaggacttcctgagattcctcgacaaagcgagggctgcgggaatcgacgtgccgatcgaagcgggcatcatgccggtcatgaacgcgaaatcggtgctgaacatgtcgaacaaatgccagtcgaaagttcctgaaaaactcggcatcatgctcgataaatggggaggtgacaaggctctgctcaaagaagcgggcatcgcctacgcatccgagcagatctgcgaactggtggcgcggggcgtcgacggcgtgcacctgtacacgatgaaccatccatgtgtcagccgacgcatttggtccaacgtcaaaccattcttcgtctgatttcaggcgatgcaacaaacatcaagggtggttgcgggtatttcgcaaccgcccttggttttatcagcggttactatagaaaccatgacttccatgcaacacaagttcggggcgcttgatctgattcgagcagggctgcaagatctcgacagggctcgcacgttgttcgacgagctgcacaatgacggcatcgatgacgacaggatgcggctgctactagccacgctggaaaaagcgtgcgatcccgacatcgcactcagcaacctggtggacatcatcaaagtgatgcaaagtcaaggcaaggatttcaccaacatcatcgccgatgaaaactctttcgtgcgactgatcaccgtgctcggcgtatccgatgaaatgggcaagctcatgcgattccgcccggaacttgtggaggccgcagccaacgatgcctgcgaaagccacctttacaatcacgaacagcgcagagcgcatgtgctcaaatcggtaggagccgatcccaatgaccacaccatgccgaccgcaagcctgccacttgccgaagctgcgacggcgctacgtaaaacctatcgcaaacaactcgccgcaatcatggcgcaagacgccacggcgaacgatcccatcgaaatccaaccgcgcatcagcaccgaactttccgaccttgcggacgcggcgcttgaaggcgcgctcgccatcgcacgccatgaagtggacggcagcgaacatgtgcgtttcgccatcatcggcatgggcaaactgggcgcacaggagctcaactatgtatccgacgtggacctgatctacgtggtggaacccgccgacatggacaccaacggcatggcactcagccgaatcggcaccaaaatggccaccacgctgcaacgtgtatgccaatccgtcatcatgggcgtcgcagaaccgacactctggcagatcgacggtggactacgccccgaaggcaaggacggtccgctggtacgcagactcgaatcccacgaagcctattacgagcaatgggcggaaaactgggaattccaggccctgctcaaagcccgcccggtagccggcgacaccgacctcggacaagcgtatatggatatgacccgaccgttcgtttggacagcttccaagcgagacaacttcgtctatgactgccagcagatgcgcaaacgtgtcgaagaccttattcccaacccgctgaaagaccgcgaaatcaaactcggcaggggaggcttgcgcgacgtcgaattcaccgtgcagatgctccaactcgtgcacggccgctccgacgaagcattgcgtaccagctccacactcgaatccctgcaggccttggccgaaggcgggtacgtctcacgcaaacaagccaagaaactttcatgggactaccgattcgaacgtgtgatggaacaccgccagcaaatgtgggcgctcaaacgcacccacctgttcccagacctcggcaaagccaacgctggcggtcttgaacgcaaacgagacatcaccatcgacgagctgaaccaaaatcccgaactacgtcgactcgcgcgcgcatttcacatgcatcccgaagaactcgtcaacaaatacgatgagacacgtcgtgaggtgcgtcacctgcacatggacatctattaccggcccatgctgcccatcaacgcgggactcgacgacgaacaggtggaactctccacgaaagccacgcaggaacgattcgaatccatcggattcgccgatgccgacgcggccatgcggcacgtcaccgcgctcaccgcaggcatctcccgtgcggcaaaaatcaaccgcatcctgctccccgcagtactgcaatggctcggcgaagggcagaatcccgacatgggactgcttaactggcgcaaacttgaagaaaacttcggctccgaaagcggatacctcggattcctacgcgattcaccatccgcggcacaacgcctatgccacgtactatccaactcacgattcctcggcgacgcactcaacaaatccgtcgaatcagtcacatggctcggcaacgacgactctttgcaaccacgttcgcgagaaagcctcgacattcaaaccaaggcgacgcttgaacgcaatgccggcaacatcaacgatttcgccaactccatccgagccatgcgcagacacgaaatcgaacgcatcggtctcgcttggatgagtggcgtgatcgacgatgaagcatcgctcgccggcatgaccgacgtatacgacgcggccatcgaagcatcgctgcagtgggccatccagcatcgcatcaacgacatacagatcgacgaagctccggcggcgatcgccatcatcggcatgggacggtacggcggtagggaagtgaacttcagctctgatgctgacgtgatcatcatctacaggccggccgaaggtgccgatgacgaccaagccaaccttttcgcacgaaaagtgcaggaagacctacgtgcgatcctgcaaggtccaaccacattcgaaccaaaaatcgaacttgacatggatcttaggcctgaaggcaaaaacggaccgctcgtacgttcctacgcatcctgcgaggaatactatcgatcctgggcaagcacatgggagcatcaggcgctattacgcgcacgatatgcggcaggcgacgcgtctcttgccgaggatttcctcatgaacatcgccgacccgttgcgttatccgaaaatcgatcttacggaaacgcagatcgccgaaatccgcaaactcaaggcacgtatggaagctgaacgtctgccgcgcggagtacgtagggatcgccatctgaagctcggcaagggcggactgtctgacgttgagtggacgatccagttgctgcaattgcagcatgcgggagacaatgccaacttgcgtgtcaacggtacgttgcaggcattgaacgagttggaacatcgcaagctgatttccgctggcgatgctgtggtgttgcgtaaggcatggcgtatgtgcacggccgcgcgcaacggcagttatctgtggagcggacgcgtcaatcaggctgatattttgccggacgattcatattcgctgggaggcatcgccgtgtatctcggttacgatgcgaatcgcggccaacatttcgaaaacgacctgctcgccgtgatacgcaaagcccgtgacgtaacggaacgcctgttctacggtcgttcgtgagtcgtgccatttgaacggctaggagcatggcgtggccgtcggaccgaagttatacggctctgacggttatgctgattcagggtttcgtgcatggaaggatggaggttgcgccacgaatacttgtgaacacgcggtgaactggcagggtctgcatttcaggctatagttggctaggtcacttcgagtggccaccttcaaccacaagttgcatgaaaggtgagccgttgtcttcagtactcgaacaggcggttgaaacgccgatggtcgggaaaagcgtcatcacattggatgatctttccattcgccagattcaagaattactccacaaggcgcagtacattgattctcatcgtaaagaagtggcgcacacctgcgacggcagggtgctcgccactttattttatgagcccagcacccgtacgcgtctgagctttgaaaccgccatgctccgactcggcggcaaggtgatcggcttcgccggcgcccagctcgcttccgtgaccaagggcgaaaccatttcggacaccctgaaaaccgtgtccaactacgtggacgtggtggcgatccgccacccgaaggaaggcgccgcgctcgtggcgtcccgtgcagcctccgtgccggtcatcaacgccggcgatggtggacatatgcaccccacgcagactctggccgatcttgcgacgatgcagtcgcgcttcggtcgcgtgaacaatctgactgtcggactgtgcggcgatctgactttcgggcgcaccgtgcattccctgatcgaaaccctgtgccgtttcggcaacgtgaacttcgtgctgatcagcccggatgagctcaagaccccgcagtatgtgctcgaccgcatcaacgccaccgactcctgctcctacacggaagtcaaggatctcgtttccgtgatcggcgatctcgacgtgctgtacatgacccgagtgcagaaggaacgcttcttcaacgaagacgactatctgcgactgcgcgacacctacattctcgacgaagccaagatggcttacgccaagaaagacatggccgtgctgcacccgctgccgcgagtcaacgaaatcgccgtcgaagtggatgacgacccacgcgctgcctacttcgaacaggtcaagaacggcatgcttatgcgcatggcattggaaagctcggtggtcggagacgaactgccgggatatgaaccgcttgaatccaaggaggttgcagcctgatggaggtcaccagcattcagaacggcatcatcatcgaccatgtgcctgctggcaccgcgctcaaggtgctcgaatacctgaaaattgatccggctaagaccaagctcgcgctgatcatgaacaccgacagccacatgttcggcaccaaagacatcatcaaaatcgaaagcgaagaggaagccgaaaccatcgaccttgacgtgctcggccttgtggcacgcaccgcaaccgtcggcattgtgcgcggcggtaaaatcgtagagaaaaagcagcctacactgccggaacatgtggtcaatatcatcaaatgcgtgaacccgcgctgcgtgactaccaccgagccggccgtacagatgttccacctggtgcattccgaccgtcaggaataccgctgcgactactgtgacgaggaagcgaagttctgacccatgaccctcacccttcacgacatcaaggtttggaacaccggcgaagtcatcgacctgatcgtcccatctgacgctgatgaaacggtggacgcttcggccatgaccatcgccccgggattcgaagatccccacgtccacttccgcgatccgggccagacctacaaggaatccatggtttccggttgcgcggctgccgcctctggcgggtatacgaacgtgctcatcatgccgaacaccgttcccgccatggatggcgtgaaggtgacggcgggggaaccgggcgccagtgaagtgctcgacgccggtttcgacacggtcatcgactatttgcagcattacgaacaagcccatgatgtgaccttgccggtgcgttatgacctgtgcgtatgcgcttccaaagggcgtgcaggcaaggaagcaaccgacgtggccgactggatcggctacctgcctgaacacgatgacgacaacaaggacgcctaccagctgtgccacccggtgaccgccatcagcgatgacggttccgcggtaacaccggaaatcctcgatcaagtgttcgacaacgtcaagaaatcaggcttatacctgatcgagcattgcgaacaccacgacaccggggcggtcaatgaaggtcccgtatcacgagaactgggcgtacccggcattcccgaagataccgaactgaaaatcgtcgaacgcgatatcgagatggcgcgcaaaaccggcgtgcatgtgcacttccagcatgtcagcactgcgatttctttcgacgcgattcgcaaggccaaagctgaaggcttaccgatcacgtgcgaaactgcaccgcactacgttgcgttgtgcgatgaagcattgctgaaatacggcactctcgccaagatgaatccgccgttgcgctccgaagaggatcgcaaggcaaccatcgcagccgtagctgacggcaccgtcgatctgctggccaccgaccatgcaccgcataccatggaagagaaggaccttggtttcctcgatgctccgaacggcatcattggtcttgaatgcgcgtatggcgtatgccacaagattcttgtggacggtggctttatctccgacgaacgcctgattgaactcatgtcgactgcgccagccgaacttatgggccacagcaaggccgacgtcacagcgttgcttgacgaatacgcagacgccgtccccggagacgacgacaccaaacgcgtgctggacctcgtcaaggttcctgcagaagaccgcgcggatctggtggtgctcaacaccgacgaggcatggaccgtgaatcctgaacgattccattcctcggctcgtaacaccccgtttggtggatggcaggtcaccggccgtccgctcgccaccatcatcggctcgaaactagtcttcagccgtatcaacaaggaggattgatggatcgcctgatcgaagcaatcgaagccaagcagaatccgagcgttgtgggacttgacccgaccgaagcgctcgtgccagcgcaaatcgtggccggctttgccgaggaaatcagcgaacaggttgaagatccggcggaagcgccgtccatgcagctttccgtggccttcttcgaattcaaccgcgccatcatcgacgccgtcgcagacatcgtgcctgcggtcaaaccgcagatcgccatgtatgagacgctcggtccggcaggcatcgacgcctacaccatgacctgcgaatacgccaagcagcagggcctgtacgtgctcggcgacgtcaagcgcggagacatcggctctaccgcggctgcatatgctcatcacctcagcggtataggattggacgacaccgcctatgatccatggcatgaggatgcggtgaccgtgaacccatacctcggcaccgatggcatcacaccgttcgtcgacgccgccaccgccaacgacaaagacattttcgtgcttgtacgcacctccaatccgtctagcagtgaactgcaggaacttgaactcgcctccggtgaacgcgtatacgagcatgtcgccgatctggtggaaggctggggcgccgaaaccatcggcaagaacggctattcacgtgtaggcgcagtggtcggagccacgcacccagaggaaggcaaggcattgcgcgcacgcatgccgcacacgttcttccttgtaccgggatacggcgctcaaggcggcaccgcgcaaggtgtggccggcatgttcgaccgtgacggcatgggtgcgcttgtcaactcgtcacgtggcgttatcggtgcatggaaaaagtccggcaagtattctgaatccatgagcgccgacgatgctctggatctggttgcggaatcagcccgtgaggcagccaaagatatgcgtgacaatctgcgtgcggtcttgccgtaacctgccgactggccaactgttcaatctgaaagaaaaacaaccaccaaaccatcgaacgtaacagagagggagttcatgaccaccgcaacaacgttcgttccgaccgttgccgaagcgactgcggcaggctttttcccgagccggcatgaagtcgaggtcgttgacaatcaggaactgactgacggcgtgtaccgtttgacgttccgtgacgaatacatcgccagccatgcaaagccggcacaattcgttgacgtatattccaacgatccaagcaagctgatgccgcgtccgttcggcgtttgcgaaaccaacggcgacgaagtcagcctcatgttcgccgtggtaggcaagggcaccgcagaatttgccggattgaaagctggggacaccattcgtgtgatgggcccgctcggcaattcgttcaagaccaaggagcccgccaattatgtgctcgtggcaggaggtcttggcgtgcctccgctcgtgcatgcggcacagcatatcgccggcgtcgaaggcgcggtcagcaccgcggtgttcggctaccgcaacgtgcgtttcggcgacgaatatgcgggcaagtatgccgacaaggtgtacagcatcgacgagagcgaaggcaacgtgatcaccttgcttgaccgcatcgaaggcgagttgatggattcgggactcaagccggtgattctgacctgcggtcctctgccgatgatgaaggccgtcgccgcatgggccgtgaagcgtgacatggcgtgccagctgagcttggaacagcgcatgggctgtggctatggcacttgcgtgctgtgtacggtcgacacgttggacggacgtttgaaggtctgctccgatggtccggtctttactcgcgaacgtttgggatggggtgaatgagatgatcgacgatacccagcatgagaacctgtacggttcgtacgagtggaagcatcccacgcaggtggcgggcgtgccgtggaagaatccggtcgccacggcttccggcaccttccagtatgcggcggtccgctggttctacgacgtgagccaactgggcgcggtcaccaccaagggcgtctccccggtgccatgggaaggcaatcccggcattcgtaccgctgaaggcccatccagcaacatcaacgcggtcggcctgcagaacccgggtgtggaccattatttggaagacgacctgcccaagctcaaggccatcaacgctacggtcatcgccaatgtggccggtcactgcgacgacgactatgtcgaagtcgtgtccaagctgaacgattctccggcagacatgctggaaatcaacgtgagctgcccgaacgtgtccgccggaggtatgagcgtcggcactgatccggtggcgttgagccgtctgatcacccgcctgcgcaagctcaccgacaagaagatgattgtcaagctcacgccgaacgtcaccgacatcaccgtgcctgcccgcgcggccgtggaaagcggcgccgacgcgctgagcatgatcaacacactgctcggcatgcgcatcaacattcgcactggagaaccgatcatcgaccatgtgaccggcggcgtttccggaccggccgtgctgccgatgggactcgtggccgtgtggaagacccgctccgcattaccgaacactccgatcatcggcatcggcggcatcgattccggtgagaaggcgcttgaatacctgtatgccggagcgaacgccgtggaagtcggtgcggccgcactgttcgaaccgaccgcgccattgcgtgtggcccgcgaactcgacgagctgctcgacgcacgtcccgaactcgcagacaagctcgccaagggcgaaacttggcgttgacctcgatcattcatcaaaggagcatgacatgactgaatccctcgaccaccgttttaccaagttcctgctggaagcgcaggcgctgaaattcggcgagttcacgctgaagtccggtcgtaagtcgccgtatttcatcaatgcgggcgcattcaacgacggacgtaagatcgccacgctcggcgcattctatgcggagaagatcgcggcggaaatcgaagcaggcaatctgccgaacgacatcgacaccattttcggtcctgcctacaagggcattccgctgggcgtctccaccgcgatcgctctgacttccggccacggtatggaagtcggctacaccttcgaccgcaaggagaagaaggatcatggcgacggcggcatgatggtcggcacccagctgaccgacggcatgaaggtactgctcgtcgacgatgtgatgaccgcaggcaccgcagtacgcgaggtcattcccaagctcaaggccgaagcggatgtggaggtcgtcggcttggtgctttccgtggatcgtatggaaaagaccaaggattccgacacgtccgcggtgaaggccgtcgaagcagagttcggcttcccggtattcgccattgccaacgtgcgcgagatcttcgaggccggccagcatatcgaaaccgctgacggcaccgcgtatgtgaccgacgagatcaaggccgctgccgacgcttatctggagcagtatggtgcctgaattctataggcgggtcctacagttgaacatatgaaaagtgcctcacaccaatcgaaagcatcggtgcgaggcacttttcaatctcatatcagagtgcatccagttgatgagtgcattcagtcgatcaggttgtatccatggtcggccaccaccgacttgagcttctccaaatagttttccgcggccttcgacagcttcgcacgctcgttcgtgatccagccgaccagcatggtctcatcggtgtcaagcggcacggtcacgattttctcattgttgagatcgccgttgtcgatgccggtgcacacggtgtagccgttcagaccgatgatgaagttcagaatcgtcgcacggtcggtcacgttgatctgcttgggggagtattccggccagaccgcctcttcggcgaagaagaagctgccctcctcgccctgctcgcactggatgaacgggaacggcttcaagtcgtccatcgtgactttcttcttgccggccagtggattgttgcgtgaaatgaacacatgcaacggagcacggaacagtggatggaattccaaatgcttttcgcgcaacatcttgccaatcacgtctttgttgaaatcggacaggtagatgatgccgatttcggaaagcatgttcgccacttggttgatgatgtctttggtgcgcgtctcacgaatggtgaactcgtattcgtcggatttgatggagttgatcatttccacgaacgcttcgacggcgaacatgtaatgctgtgtggacacggagcacagctgcttgcgtggcttcgcgttcttgtaacgttcttcgagcagcgacgcctgatcgagcacctggcgcgcgtaggtgaggaattccgctccgtccacggtcaaggcgatgccttgcgacgagcgggtgaagatctcgatgccaagctcgttctcgagttccttcacagacgagctcaacgcgggctgtgacacgtacagctcgtgcgaggcttcgttcatggaaccgcattccacgattttcacaatatatttcagctgaagaagagtcataaattcaggttagagccatgtactgaccgtgggggagtgcttataccctcttgtctggatagtggactgccgatcgcgcagatcaaggacgtgaaaaaaccaattgcagcttgacgaggatcgcacacagttggaaaccccacaaaccgtgctcgacaaaaccggtcaggtgttcgcccaatgggagcggaccggcttgacgggtcaggcctacaagcaaaagagttgtccctatcggagtgctccatatcggcataagcgacaaaaagggattgcccggctttctacacaccagacaatcccgttcgtcacaacctactacagttcggtctactggtacagatggccgccctgctcgcggaagcgctcgctcatctcttgcatgccggcagcgatggtttgcgcgtcggcgacgagcttctcctgtgcttcggcattaccgaattttttgcggatgttttggctgatggccatggagcagaacttcggaccgcacatcgaacagaaatgcgccatcttcgcaggctcggccggcaaagtatcatcatggaacgcgatggcggtgtccggatcgtagctcaggttgaactggtcaagccaacggaattcgaaacgtgccttgctcatggcattgtcgcggtcgatggcatgcggatgatgcttggcgatatcagccgcatggcaggcgatcttgtatgcgatcacaccttgcttcacatcgtccttatttggcagcccaagatgttccttcggcgtcacataacacagcatggcagtgccatagcgggcgatttccacaccgccgatcgccgacgtgatgtggtcgtagccgggagcggtgtcggtggtgagcggtccaagcgtatagaacggcgcgtccttgcagatcgccttttccatctcgatgttcatgcgcacggtgtcgaacggaatatggccgggtccttcgatcatcacctgcacgtcgtgttcccatgcgcgctgcgtaagctcgcccaaagtcatcagttcggcgaactgtgccgcatcgttcgcatcggcaagcgatcccggacgaagtccatcacccagtgagaatgcgacatcgtacttggcgaagatctcacacaactcatcgaaatgcgtatacaggaagctttcctgatgatgctgcaaacaccattcggccatgatcgaaccgccacgcgaaacgatgcccgtcatacgattcgccgtcaacggcacgaaacgcagcagcacaccggcgtgaatcgtcatgtaatccacgccttgctcgcactgttcgatcactgtgtcgcggaacagttcccagctgagcttggacgcatcatcctccaccttttcgagcgcctgatacattggcacggtgccgatcggcacgggggagttgcgcagaatccattcacgagtggtgtgaatgtcgttgccggtagacagatccatcacagtgtcggcaccccacttggtggcccacgtgagcttctccacctcctcgtcaatagacgaagtgaccgccgaattgcccatattggcgttgagcttggtgaggaacttcgagccgatgatcatgggttcagcttcgggatggttgatattgcaaggcatgaccgcacgccctgcggccagttcgctgcgtaccaattccacgctgcaatgctcgcgctccgccacatagcgcatttccggcgtgatgatgttgtggcgcgcgtaccacatttgcgtcaccggatgatccttggccttcatcggcttatgctggcgaccacgccattccttggaagccttgccacgtttgatggcgcgtttgccgtcatcttccaaattgcggcgacgtccttcatattcttcgacgtctccacggtcaagaatccagtccaaacgtaggggagcgagaccctccttcggatcgcatttcggaccttcggtgttgtaatccttgaatggtgcgttcggtccgacgccaggagtgtcagacagtttgatttcagtgtacggcacttgcagatcgtaggaaccgaattcgttttcgaaatgcaccggcgtggttttgcgaatatgtgctttgtctcgctgcttggaatcgcgtgcggcaatgtcgacgcgctgttgcttggcaagcttggaggcggccttggcttccttcgcattggtgaacttcttttcgccggatgcgccgtcggctgtgttgtcagtgttgatttccgctgttttctgggctttcacgcgcggcgcgtacccgtgcttcgtgtcgccacgtacggctttccagcgcgctaccatattgcgggttgcagcttccggatcatcggctcctgcaatcgcggacaccacgaaccagcctgccgcctttgaatgcgccagcatctccatatcatctgcggtcacgccaccgcctaccactaccggaaaaccactggctgaacaaatggtgttgatctgctcttcgtcaagcgtgcgaccggaaccgtcattgccgcctacggacgcttccggcttggtgacggaaacatgcagtggtgccgcaccgatatagtcgatgcagccgtcgggcaattcgttgatgagtttgaccaggctttccgtttcggcggacaagcccacgatggcatcttcgccaagcagtgcacgggcttcgcgcggttccatatcggtctgtccgatgtgcacgccgtcaaccttgatgcctttgctgcgggcctgccagaccacgtccacacggtcgtcgatcacgaatgccacggaatccgacttattgttgtcttcgatgatttgcgcgatatcacgcgccatgtcggtgagatccttcgcgtcagcgtctttgacgcgcagttggatgaagcttgcgcccccgcgcaatgcgtcatcgatgacgtcggtgatcggtcggcctttgcaatcctgtggtcctaccacaaaataggcgctcaggtcgaagctgtctcgcatcgacgcatatggataattgctcatgattcccccttgattatgctgttttgggttgggaaaacttgatttcgcaggcaatgggtatgctgacgcgcccgtatgctcggttatacgggatagaaaatggaattacgattgatgattgcgcgatgcagactgtttggtcgacgcatctgctgcgcagacttttacggatgccaattgacgctggcaatgcgtgtgcgctacgacactcattcttcgctccctacgttggtgctaaccaacaggttcaaagggtcaggcattcgcctatctcagctccgttggggagcccccctgctttacgtgttggctatgaatctacgccctgcactggacgtaactttcatcgaagcccacaggagagttaggccagccgtcactttcgcatgtatcgcctccatccgcgtcacgcctccgccgcgcaactcacagcaaactctccttgcaggctaatctatacttcagttcaatgcattgcgtgtgaaagaggtcgactacatgttggaaacggaacggctgacattgagggcttgggcggaaacagatgcggaaagcttgtactcctatgcgaaagatccggatatcgggcctatcgcgggctggcccgcacaccgatcgaaagaagaaagtctcaatacgattcgtcatgtgctcaatggcaaggaatgctacgcgatttgcgagcgcggcagcaataaccccattggttcgattgagttaaagcttaatggtcatacggatatgacggatcgtgatgatgagtgtgagttgggttactggctgggcaagcctttctgggggaggggttatatgccggaggcagccaaggaggttatccgtcatggttttgttgatcttggtatgagtgcgatttggtgcggctattatgacggcaatctgaagtcgaagcgggtgcaggagaaggttggttttgtctatcatcacacgtgtgatgaggtaccggtgcctcttatgcacgaggtgcgtgtcgggcacgtgaatgttcttaccaaatcacgctggcaaaatttagctgcctgctgattgtgctagaagctaacctagaatgctttggaagggtcttggtgggcttcgaacggatgctggtcaagaccctttagagcttcatgatgttttcctcgatgcgacggatgacgtcaatgaaagcttcatcgttgtgcccggttggatctggcagattccaattatcgtcgaaagccttgccgatatagggacatcccacgtcgcagcccatggagatcgcggtgtcaggttttggaatatccgaaatcagcttggagtattgcgttttctccatgtcgatgccgtaaagctctttcatgagtcgtacggcatcctgattgatctgcggcttggtttccacacctgcggaataaaaatcacaatcggttccgcgtagatgctttcccaacgcttcggcaatctggctgcggcatgaattatgcatgcaaataaaagccacttttctcatagctttccctgtctgcgatgttatgatttcacgattgctgtcccgtattatacgtttcgcccaatgctccgcgttcacatcatcgaataacacaatgcccggtacgaccatgtcataagctggtcgtaccgggcattggcttggattattcgccccagacttcttcggcgatggaccttacgagtgcgatcttggcccactgctgctcctcagtgagcttgttgccttcctcagtggaggcaaaaccgcactgggtggacaggcacaagcggtcgagcggcacatactgggccgcttcggagatgcgagccttaatcacttccggatcttcaagttccggtctcttggaggtgacgaggccaagcacaacctgtttatcgccggaaacctcagccagtggcgcgaagtcaccggaacggtcgtcgtcgaactccagatagtaggcgtccacgttctcttcgccgaacagcttggctgcgaccggagcataaccgccggacgacagccacgtggaatggaaattaccacggcagatatgggtgttgatcaccaaatcatcaggctggtctgcgatcactgcgttgatcacgtcaagattctcctgctgcaggcgggccgcatcctcatcgctccagccgagacgctcacgcacgctcttgtcgcacaggcgagtccaagtgcagtcatcgaactgcacgttacggcagccggcggcatacaggtcggcaatgacctgacggtatgcggccacgatatccgcggtcagctcgtcgtcatctttgtagaactcgtcgtacgggtaggcgttcttgttgccggtaagcacgaaacgggtctgcgctggggaaggcatggtctggcgagcaacggtattgtcatcttcaaactgcctgacgaacttgaaatgctccacgaacggatgatcgtgtccgtcgagcttgccggtcaccgtggcagtgtcggcgggagtgacctcgtcatggaaggcaacgcgatgggcggctgcgacatggtccacgccgttgaagccccacatgaaatcgaaatgccaccagccgcgacggaattcaccatcggtgatgacatgcaggccggcggccttctgcttggcaaccagatcagtgatcagcctgtcttcgacagctttcaattcagcggcatcaataatacctgcagcataatctgcacgagcctgcttgagttcgtccggacgcagataagaaccgaccacatcggcgcggaacggcgcattcttggaatatgtcatgattctccttcgactattgacttgcaattaacaatcacaacgacaaaaccaacaatatgctatcccaccacccacaaacacgacgtattccatccgcctggttgacaacgtacttccgtccatccgcagagttttcaatgctggaataaatgggggtaaatgacactgcatggcgttccgatattggcagacgcgcggccgatgattgtgcaaagaatcgcgaaaggcatgcggaatcacgacatgagtggcgttgtgttcgtatataatcgcaacggacatgaacgactgcaaggaggctgccatgactgtgccgcaacgagtgcttgacaccatgaattccggactgatctacacctgcgatgacgaagagatgatcaaagcacagaaggaacagatggaactgctatacgacttcaatgcaacccgccccagtcaaatgacgcaacgcaacgaaatcgcacgccaactgcttggcgaattcggcgaggacgcttatatcgaaccgccgttacatgccaattggggatgcaacacgtatttcagtgcgcacgcttacgccgatttcaaccttacgttagttgatgatggtgaagtgcatatcggcgaacataccatgatcggcccgaactgcactatcattaccaccggccatccgattcgtcctgacctgcgcgagaaggtcacacagtattctctgccggtcaccatcggccgtaatgtgtggttgggcgccaacgttaccgtgcttcccggcgtcaccattggcgacaattcggtgattggcgcatgctcgctggttaccaaagatattcccgccaatatggtcgcattcggacagccatgcaaggtgtatcgcgaaatcggcgaacatgatgacgtctactattggcgtgaccgcatgatcaacccaccctatgaccagaagcagtaaaacaaatcactatcgaccaaccgttcaaacaggtcgaatcatcgtggactagtcgttatgacagatccacgatcccataatttgcgactgtcaagcgaaataccgggcgcaccattgctccaccacacgggcaaggtgcgccttctttgaaaactcagtcctggttgctccaatcaatcatgcttcccaccataacgtgcgaaacgtaacgcacgcatgtccgcggtagatgtttagataattatctaaataagaaaatgtgtgaacattgcgaagcgaaggaggaatgtatggcaggggagggattcaaagcgctctccgatcccacgcgacggcgcattttggaattgctgcgcgaacgtgacatgacggctggtgaacttgcggaacaattcaacatgagcaaaccgtcgatcagccaccatctgaccacgttgaaaaccgcgggactggtaaccgacgaacggcacgggcagaacatcatctacagtctcaacaccacggtgatgcaggatctgatcggatggttcatgggattcatggacggcgatggaaacgtcaatcaagcgaatgatcaaacagacaataaataaaggagggtcttatgcgcgggaacaacttgaacgatttaaaaaacaacatcaacaatgccgaagacaagaacaagactgattcgggggagaagatcgctccgatcggacgcaatctgtgcattgcgcttgttgcactgtgtgtagtcaacatcatcgcacatcttgcctgctatagtcggcttcccgaaaacgtgccgattcattggggtgccgatggttcggtcaatggttatggcccgcgtgccgtaacgttgattcttgatgtattgccgttgctgtgcttgggacttttcctcgtcatcccgaagatggaccccaagggagaaaactacatgaaggccagcggactgtatcgtggattcgtcatcgcgttcacactcatcatgtgcggtgtcacatggttcactgaagccaccgcattcggtgtaatcccagctaccggcggtcccgttgggcttattgttagcgtggtattgggcgcgctgttcgtcggcttaggcaattaccttccgcgcatgcgccagaattacactttcggcatcagaacgccttgggctctggtcgacgagaacaattggaagcgtacgcagcgtgtgggtggcatctctttcatggtgttgggagtgctgttgattgtggcgggtgttgtcagctctgttgtgcctgtgggcgacatgctcatggtcgcaattattgtgacgatagcggttggtgcagcgctcgttccttatgtatacagctacctgttgttccgccgcagtcgcggttcgcggcaaaactgaagtaacgtcatagcgacgctagataccgtcgccttgacacagaacacaaatcaacgttgacaaacgccgttggcaatctgggaaagtttaatgaacggactcaggagaaccaattgcaaacagtgaaggaatcgaatctgaatttcttcagtccaacaatcggggtgcggttcacatgcgtgcgatccgcaccctttgttaattcaagtgttcgttttgaaaaagtcagaaatccatgcccaaagatttcagatcgcggcgagcctgaccggcgttagtgaagcggaacgcgtgcatgcccacggcctgtgcgccagtgacgttcttcgcggtgtcgtcgaagaacacgctggattccggcctgagattgaaacggctcagcgccagttcgtagatgtcggcattcggcttgtgcatcttctctacgccggacaccaccgtgccctgcagcagctcgccgagctgcgggaaacgttcgaatgcgaaatggaacgtctcatgcgaccaattcgtcaacccccacacgccgtagcctgcagccttcaaatcacgaagcagctgttccatatccggaatcatgcggggaagcgcatcgccgtaacgttcgatgtaatcgcggaaaatctcggcgatctcttcgccctgttcacgtaccacgtcgggataaatggcttcgaaatcctcgccatggtccatgcgatcctcataatcgtagaagccgcacggatcattatccgcgcaaatacggtctacaaccacttgggggtacctgccttcaaggcatgcgcgcgtctgccagtcgataagcacgccgcaaaaatcaaagaccacatcggtgacgttggcactgggggaggtcatgaaaatccttcctgcaaaatacggattggcaacgctagtgtagcgcaaagccaccgatgttggggctggtgttcggtaaatttgttttgcaattaaagtaattgcaaaaatgccggctgaatgccgccgataatatcgctcgcgatgatcggatggccgatttccccgaaatgctgctttttggaatgcccatagatctgcggacgatgccatccacgctgttcggatcgcgatgcgatcgcgcccgcaagaccatgtatgtaggctccggccgccacgacttcgggaactaatgccggatcctcggcaagcatgtcgtcctgttgcgcgagcagggcgcccaacatgccggcaagcacatcgcccgatcctgcggtggacatccacgccggcgcgcgtccggaaagaatcacccgctcgttgccttcgccgtccgtgccgaccaccatggtcaccgcgcccttcaacaatacggtcgcgccggtcagctcatggaccctgcgggcgcaggcgagcggctgcgagcgcactttgtcgacgctggcttcgtttccgtctagccgagtcaacatgcgggccagctccccgacgtgcggggtgacaaccacttgagccggcactttgcctggcagcaggtccaaagctccggcgtctaccacgatcggcggcatgcccagggcgctttcattcctggcgtcgtcattggagccggttttttcctgcagtgcgtaatgcttcaacaacgcggttatggtttcgcgttgaatgtcggtgtcggcggcttcgtcgccacccgtgggaacgccggaaccaaccacccatgattggacgcggcccttgccgatcaccgcctcgggcaacgaggaaagcaccatgtcctgcgctcgttgcgggccgagatagcgcaccatgccagtgttggcgcgcgccgccgccgtggccgacaatacggctgcaccggggtaacgggcggagccggtcaccaagccgaccactccacgcgaatacttgccgtccgaaagttgcggaaggcgaatcgaatccgttacgaaatcgccgtccgtcatttcggccgcggggacgcaatcatcaatgtcgaaaccgaaatcgaccaaagtgaggcggccgcatgcgtatgaggcgggtggcaccatcgcgcacggcttcatcgcgccgaatgttaccgtaacatcagcaggaatgtacggtcctggaagcgaaccgtcatttacgccaacgccggacggcgtgtcgatcgccacgacgagcggcagggcggaggaaggctcgttgttcggcagggcgggcctgtcgggaagttcgccatcgaatcccaaggaggaagcgatggcgcctgcgatgccacgcaatgcgccgcttacgccgattccggtcatcgcgtcgatgatcacatgggagccctgaacgtattcaacggcggcctgcagtcgttctccggcctctcccgcggaaaaacccgtggtgcatcctgggatttcggcggcgggatcaagtacgagaacacggcctccggcatgcacgaacgcgccgaacgcctcctcgtgcagggaacgtcccacggcgatcgcggtgacatgcgcgccttcgttcgccagttccgcgccggcgtatagaccgtcgccgccattatctcccgcccctacaaggagggctacccgcgcgtcctcgacggcgaggtcctcatcatcgagcagtgtcatggtcacatgggccgcagccgaggcggccatgcgcatcagcggcacgccgtcgtcaagcagcggacgttccatctcgcgcacggtatcggaatcgtaagcgctgtacagcagtgtttgcaaacggtcggcgtcgtcggcgatgtccataacgttcccttcctcgtcgtctatgagcaacaatccctactgtagtcgtaatattgggagtcaaggatttttcggcgtggaatggagaccaaaatggcatatatcgaaatgcagcatagttacaagcgttaccaaatgggttccaccaccatcaccgcgaacgatgatgtgagcttcggcatcgaaaaaggcgaactggccatcattctgggcgcgtcgggcgcgggcaagtcgacggtgctcaacattttgggtggcatggacacgaattcagaaggcagcgtggtcatcgacggacgcgacatttccaactattccccgaaacagcagacggcttatcgcaggacggacatcggtttcgtgttccagttctacaatcttgtggcgaatttgaccgcgaaggaaaacgtcgagctcgcctcgcagatcgtttccgatgctcaggatgccgtcaaagtgttggaagacgtcggtctcggcgatcgtgtcgacaattttcccgcgcagctttccggcggtgaacagcagcgtgtggccatcgcccgagctgtggcgaagaatccgaagatcctgctgtgcgacgagccgaccggcgcgttggactacaacaccggcaagcaggtcctgcagattctgcaggacatgagccgtaagaaaggcgccaccgtggtgatcgtgacccataattccgcgatcgcgccgatcgcggaccgtgtgatccgcatgcatgatggcaaggtcaccgccgtcgacgtcaacgagcatccgatggacatcgcggaactcgaatggtgatgtcgcgacacgctgtgcgacactcgatttgcgaagacaaaggatttgtgtaatatatgtgacttgtgcacggaagcaattccgtacaggaagcacattcctgcgtagctcagttggcagagcatccgactgttaatcggacggtcactggttcaagcccagtcgcaggagcgcgtttttaggtttttcctgattttcgtcggggagaagcttagaacaggagaatattcctgcgtagctcagttggcagagcatccgactgttaatcggacggtcactggttcaagcccagtcgcaggagcttaggctttcagcctttttgacagtagggttgagggcgttttggacggtggcgttcgaggggttgccgcgaatggcgttctctccgattctcagacaaacttgggcgtaatgctcgaaaacgccttccaaacgccttccagagcggttttcggcgtgtttccgtagtgtttgcggtgggactgtcgccaggccgtcagaaacgccatggaacacgtttcaggggcatgagagaacacggcgtgaacgggagagaacgttccggcacgccgtaacgacatcgcgcgttccaaccatgaaccaatccgaccggaccatgccggcgaacgcatgcggacggaccggcgtccatcggtatggataccccgtgttctctcctcggcttgggagagacgggcgtgcggatatgagaaagccagccgtcttggaccgaatctgctggttgacggctggcgtgtagatacaaacggcttgcgaagcatcgaacctgtcgggcgagtccgcccttgttgtctaatgtctttgcgtcttaagctaaacctttgacgtggacgattcgaccgtgatggccgaaaaccggtctaaaaacggtcgaatatatcgaagcggctatttggtttcgccaatcattccgtcgaacccttccggacggtacttcgtcttgcgtacccattccagatggcggttcgcgtagtgttcgaccttgcggttctcttcgggcgtgccgatcagcagtatccacacgctgttgccttgattccatgacgttgccttgcgcacgcatttaaccactccgcgttcttggaggaacctcatcgctgcgcttaccgtgcccaatgccgtgtcgttgcgtctgatgaagtattcgtccaaatctatatcgccagcgaacccgcgagccgctatctctggtgtcggctgtgtgagtccgcgttcctgtacgatggagtcgtatccgccgaagtagtagcgtggaggaatcttggatgggtcatcgcttgccgcgtccatgtttctggtgcggtgcgcgaggtacagcaggacgctttcggctgtgctgttcggtattgccacgagttctcctttgtggcttggctctcgtgatttggtgtttttgagcagcagtcctttgctgagcacgttctcgtatacggcatctgtgttcgagtatcccatgtcttccatgtctttccctccatgcctcgcggtatgctcctgcatggagattgtagtgtctccgttcgagcgctcccagctgttttccgattagtgggagcgctcttttcttgtcttggaatcaagtttacgtcatatagtctacagacacacctgtgtttgtgtctgtagacacacctgtgttagtgtctgcaaatgattactggtgtgtctgcaaacaaaactaaatagtatatataaataagattaataatgaaattattaattaaaaagcaaaaacggtcagaaagagggcatgaaaaaacccgcctgcgacaaacagacgggcagaaaaagaactcactcgtaatcgcctgaatcgtaatcccaatagtccgaatcatcatcgctatcagaatacgaactatccgaaccattcctatcagacgagtctgaagaatcaaaactatacgcagcagccacgcctacgaacaaaagcgccgaaaccacaatgccgacaatcgccacgatcaacgccttccacgaacgcgacgaagtgcgatcatccacgaacttccgcatatgcgactcagcgccatcaccatacttctcacgcaatccatcaacggacaaacgttgaggatcaccggcttcaaaacgctcaatctcatacaacctatccaacgggataagccccgaacgcctgatgccattcctcaccgaaaactgaatcacccaagccaacaacgccaatccagcgatgccagcggccatgcaagccaatccgattagaaaaaccatgataccctccttgctctcctgcaatatgtctcaccaaggattatatccccccccccaaaaaaaaaattgatggctgatgaatcatgggcgtttctcaaacaagccatccttgagaatctgcctgtaatccgtaagaacctgcatggtcacgttcagctccgccgccatatgccaggtgtcgccgtcccacatccattcggccatggcgaactcggacgggcttatcagcatcaaagccgtctcgcgtcgcgccctacgttcgcatttcacgccgaaccgcgtgccgcagccaagatcacggtacttcgcgtgcacaagctcgtggcatagggtgcagagcctctgccggtcgttcaaccagttggcaagccaaatcgtccgcagccggtcgcaatacaatccgcaggtagtgccgggaatatcggattccaaaaccttcaaccccatggcttcggactgacgttccaaaacgtcgatggtgattcgtgacattgttcccttcgcattattaggcggcggcatcatgattgaataccgccgccatattcattgccgttgtcagtcttccggtgtttcggcttcgagtctcgcgttcgggtcgtcgttcgcggccatgtcgaactcttcacggtagatgatcgggctgttaatccagtcggcgtccgcgttttccttgagacggcgcgcgagttcctgaagcagctcgtcattcgaagcgtcatgtagtattccggtgatttctccgtgcttagcttcgtcgttggtaaggaatccaaactggacgagagcttcgacggggctggcgttatacgctcgggcaatgataataatggcttcggcggtgaagtcgcagcctttattgtattgcctccaaagcgttgagacgctgaggccggtcttgacgctgatttcgttgattgccgcgtctcctgttaactgtttgaaataggttatcttatccatgcttttcattatgaaataaaaactctttcatgtcaacacgccgtgtggcgttttgagttgaaaaaaagtctttcattgtggtatattcattttcaggttgaaaaaaaaatgcttcaaaatgaaaggaatgtgatggcggactacaagatgcttttccgagacggcttcctagacagagccaagcgcatgagcgggcttaaaaccgacgaagccttcgccggagcaatcggagtcagcgaaagcgtgcttgcccgagcgaagaagaccaatgaatgcacaccgctcatgatggtcggcctctataaagcattcggcttccagcccggcgaagtcagccaaatcaaaccagtcgaaaacatgggaaaaacagcgtaatcacgtttctccaccccaaaccttttctctgaccccaaagaacaaggctcacaccccaaccaagaaaggaacacgccaatcatgaaactcaaagacaaagtagtggaagcactcaaagcagacgccgaatccggctccggtttccttagcgggttctccaaattagacctccgcttccacgatagcttcgtcgccatcgacggagaaatcgaggtaggccgtgtcagatactcgcaaatcgccaacgtcatgcccgagaccctcaacctcaatcccgatgacgaatacgaggaaccggaactcctgaaccctccgacaccgccgaaacgggaaaagccggaagacgtaacggccttcctcgaacagctggcaaaactaaacgagcaaggcgatggactgcttgagcgattcattggaaaggaaggctccgaaaccagcgaagacgccaaaaacctgagaagactgttaatcggaggcatcgaccagctcattctgttcggcacggtcatccgcatcaaggaacgctccgcggagaaatgaaaggcagaagcatggaaaaacggcataagccggaaggagaacaccgtgaacggactgcttaacccgccaaaaccaccatacgaggaaccaatcgacaacgccggacgatacaagctcctcatcaacgaaaataacggtgcaaccctcgtggaagccaacggaaccgaaacaatcatactcgcacgcatcagcgaaggccggttggaagacctctcgcacagactctcggaacgtctgggacaaacacgataggaggcacatcttgacagacaggcaaatcgttgtggaagaagaaatcctcaacaaggaggaagccgcaagattcctcaacatcggaatcgacaagttccttgaactctacggggcatgcgccgaccgtcaaggcggcaaaacaaccacctacaagaaatcagtgatcctcgaccgatacgacgcactctgcaaccgataaaacaaacccccgcccgcaaacatccaaggaagcatccaatgaccacacgtccactaccaaaaccagtgaaacccaacgtcaaacaccagcatgaacagtacggcacgctcaccgccgtcgccacgatctgcataacaggcacgctcctgttcagctggtcggtaccgcaacacagctggcaggccgtcatctgtgcactgctcatgctcgcaagcgtcctctacctaggcgtcatcgacgcacgccattacaccctcgactgcgaggacttggaataaaagacttcccaccagccgacagtccaacaaacaaaccaaattagggatgtttttcgcggacatccacgttcaccatgtcggctggcggggaacacatataactgaatatcgattattatccacgcgccgaccgcatcttgcttcacatacactgtcggcgcactcggttgggcgacggttcgcccgtccacggattccaatcttctcctgtctaaatatatgcaggcactccggtgcttgcgggtcctttcttactatgcctgactgcttcaatcacagtcggccacgccaccggccgtgaacgcgttcaggtcgcgttccaacggtcaaaggggcgttcggaatccaaggacggcatcggttcgactccgatgccagccactcagccccatccactcgtcaggacggggcacacaacctaaccaagcaaaaggaaaacaatgagcgacaacctcgaccgcatcaacgcacgcatcggaggtgaagcatgagcacgatacgctacatcagcctgttcagcggaatcgaagccgccaccgtcgcatggcaccagctcgggtggaagccaatcgcatacgcggaaatcgaaccattcccaaaagccgtgctcagacaacactatccggaagtgccagatttaggagacatgaccaaagttgactggaaacaataccaccatgcggcagatgtcgttgtgggaggaagcccctgccaggcattcagcatcgccggactcaggaaggctctggacgatccacgcggccagctcatgctcgaatatctccgagcttgcgcagaaattgatccggaatggatcgtctgggagaacgtgcccggagtgctgtcggctgaacgcggacgggctttccggtcgctccttgaagccgtggccgaactctggcctgatggggggggcggcatggagagtgttggacgctcagttcttcggtgtggcccaacgacgcgaacgtgtgttccttgtcgtcaacactagagactggcgacgtgccgccccggtactttttgagcgcgaaagcctgtgctgggatcatcagtcgagccgagagaagaggaaaagccttgccggaggaactgctggcggcgttggaaacgcagatccaggcattggaaacttgacccccggtgagaaccagtctcggagagtgtactcgtctgacggaatcgccccggcattgcagtctcgtgagaatggtgggcaggatcagtcggctgtcatgctggacttccgtcagcaggatggaaggttcaaggtcagtgaacatccggacctgtcaaacactctcacctctcacatgggaaccggtgggaacaatgtcccacttgtgagagcgttcaaatggaatcaaggggaacgctcgcgcagcctggcgatcggcgatgtgagtccgacattgagcactgaccataatccagccgtctacgaggtggcaggaaacatcatcggtcgcggaccaatgaacggcggacaccagcttggtgttgccgacccggacgaaaacggcgctttcacattgacttccactgacagacatgcggtggctgaaatcgagagagagggagaagtgatgtgcagtgcggacagtcaatcgaacgcggcacggtgctttaatcttgcgccgacactgatggcacatgcggggaaagacgccccattcatctatccgacagccgatgggagagactaatggcccttaccttcaagatacgcggcggcggaacgggggggtaagggattcctgggacaggaagagctttccgccacactcagcacgcacaacgaccagtccctatacatggaagaggattcgatgaaaggtttaacggttcgcaggctcaccccgttggaatgcgaacggctccaaggattccctgatgggtggactgacattcaatggcgcggcagggagcacgcgccggacgggccacgatacaaggcgttggggaattcaatggccgttccggtcatgagatggatcggtgaaggaattcaactcgttgaagataacaaggaacttttcaagaaggaaaccaaatgagtaacgtaacgcagtccgatgattcgattcgtgaatggcccgaccgggagatcaacgaactcctggacgaacagcccgcaggatgccacttccaccaaatcgcgttcaacgacgcgggcgaagtgatgaaactcaaaccagtcaacatgccacccaaggcatgacacaaaaacaaatgcttcccatgcgcttagtgcgattggcgcatgggacttcgggtggaacggcacaacaggaaccgtccaccggcatcgtatgggctttttgaagcccctttcccatacgacagccggaaacttgggataacaggcacggtaccgaccggtgggttcgactcccacaccacccacgcaaaccatcaacagatcagagaacaccatggaagacaacactccagaacgtcttgacaagagcctcacacgcttggaaatggcgcaccagctaagcgaaacggcagaactcatactcgccgacgtgaacaagctcgtcgcatacctcgccagcgttgacgccaacggcgatggcatagtcgatgaagcggtgaacatcacattgaaagacgccggcaagatcagaaaacacgcgaccgctatcaggtatggaatctcagaagcgcttgagaacgccgacgcacacgaaagcaacgaagaacgcaaacggagattcatagacaacctcctcaaaagttcggacggtgagtgaacgtggacgggcggacgatccgacaaaccatattggacacgcggttcagaggctatgacgtcggccaagtggacgaactgttggagaaaatcgcgcacgccatggacgtgcttgacgcggcgaaccgtgaactatggcggaaaaacaaggaactggaacaccgattgacaagaccggagcatcaaaccaatgagtgaacgcgccacacgtacgaactggcagcggcccatcaccggccacaagtccaacagtggtggacgcaaaggccggaaacaagccgaaaaacccacactgaccgaacagggaatcgacgttgacgagttcatccgcgaaaaccacgcccgcatacagcggctacgcgaaaccacgccacgcagcggcattcccgtaggagcggccatcgcatgcgacccacgcaaacccttggaacacgatcagaaaagagacgaagtgttcgacacgttcaaacacctcagccaaagccaaaaaaggaaacgtgagcgcaagcgacgtggcacgaacgctacgaatgccgaaaagcacggtgctgtaccagatgaacaatctgctcatgttgggaatgctggacaggcacggacacacatggacgttgaaaacaaggaaggatgcacagtgacaggcatgatgtccttttcggaatccgatctcaacgaactccgtaaactccgcgacaatggcgaacagttggaaccggaagagctacgcgcgctgaacaggaaggaactgttcgaccgcaaccgcaaaccagaacccgcgccaaacgccaccatcggcgtcacataccggaaagtctacgaaacatggctggaacaatccaaaacaggcaatccatcagaacgcagcatagcggaagcgttgggaaaaagcgtctccaccatccaccatcacgtcacgaacatggtgcgtgacggatacctcgccaaagacacgatccgcgaacgggaatacgtgctgaccgacaaaccattcaacccatcggacagggaaaaagcgaagcaatcaccggacacgctggccagaatccgtgaggaaacagtcagactccaaaacgagggcgtcgcattcgacccggctgaatacgcgcggatcatcagcgaacgtgtcggcaaatccaagaaaacggtacgcaactatttcgccacgctccgcagggaaggcgtactgccaccggctgagaacccgttcgccagccagcggaaaccaaaaccagaaccgaaaccagtcgtcaacaaggaggaaccaatgagccaggaactcaccgccaataaggagacagcaccggagaaacagtgcgagaacccacgcgccatcatcacgaacgcgctggtcggcatctatgactccatctcggcattgcagcgtgccgcataccatgccaacgacaagatggtctacatgttcgccaccaagctgctgaatggcgaattgatggacatcaaggccaactacagcaaggacgcaaaatgaagctcaatttcgatagcaaggacggcgttttcaccatcaaagccgaaaacgaagaggaaaaaacccagctcaaaacgtcggcggtcgccatctgcaatctcatcatcgattttttcgacggtgaaatacaagaggcgaaagtgacgaaggaatgaaacgcatcccactcaaggacacggcgaactcacggatctgaaagccaactacagcaaggaaaacaggtaatggacaagaaaaccctcaacgaaatcaccgaaaaatacgacaacaccagcccggaccaactccgcgccgacctcgcagtgctcacggccatcaacaagcgcagcggcgaaatactcaaaatcatcaaaaccgcatgggaacacgaccacgacggtggagacaaggaaaccgtcaacatcgcaggcgtcgaagccggagaaatcagcctcggcaaaggcggcaacggcacatacaaggtaaccgacgaacgagcctacggcgcattattgcacgacaacgatttcatgattccaggcggacagcccgcagccgaacaagtctggatgccaagacgtgaagcaatggacgcgaaatacctcgaagacatgatccgcgaccacgacggcgaactgccggacggcgtggaatggaagccgggaaggccgggcgtggtcacgttccgcagcacgcgcggcttcgtggacaagctgttcagcgcggaactcgcaccaaccgtcatgcgcctactgctcgctgacggatcggaaaacaacaccgggaaggaaaccaaggaatgagcaacgaactcacaccaatccagccgcaaccgcaacagcagatcacattgcaggaccagatggctttcgccaaagcggtatgccaatccgacatcatccccaccgtgtatcgcggcaagccagccaacatcctcgtggcggtaggatacggtgctccgctcggactcacgccaatgcaaagcctccaggacatcagcgtcatcaacggcaagccaaccgcttcggccagctttatcgccagtcatgtccgtatggcgggccacaagctccgtgtcaagaaggacgagaaggcgttgagcgtgaccgccaccatcgtgcggtccgatgatccagattatccgatcagcgtcacgcgcgacaaggcgtgggcacagcagatgggcttgctcaacaaggacaactacaggaagcagcctttgacgatgctcacgtggcgtgcgattaccgccgtggcacgcgaagcgtgccctgaaatcctttacggcgtgcaatactcgcccgacgaactccacgaccttgataccaacagtgacgtgcgggcggaagtcgttgacgatgaacagcagccgtcacgccagaagcgtcgcgggtatggaagccgcgcgcgccagaatccagtcgaacaggccgagcagcagccgcaggcgtgcacgcccgaacagactgaagccatcttcaccatgctgcgtgattgcggtgtcgcgtcgaacgaggaagccgagcaagttctgtaccggctgaccggcaagcatggattgacaccacgacaggtcggccggcaggacgcggacaatctgctcgtcgcggcccctgatttcgttaaacggaaaatcatgcaggcattgtaggaaatccgcaaaccacagcaggaacaggtggaagtcgttgacacgaccaccgccgaacaggaaaacactgatagcaaggaggccgagtgatggcagatgagaccgttgaattgttgcatcgtttacgtatcacgcaggaactcgttgaggattgcaagcgccaactcaacgaggccgaacggaagaaaaatggcggaatctacagggatgcgtcaggaaatctttggattcacaaggccaccaacttgtgggaaaaaatctatttcagtaaggagcgcaggtgttgcaagattgaccacttcaattgggacgaagtcgtttctctcgcacagacagaacagattctcccgttgacatacatcgccccattcaaggaaaacgagggggaatactgaaatggccggtgagaccgttatcacgatcattgggaatctgaccgccgatccggaattgcgtacgacgtccgctggcgcgcaggtcgcgtcgttcacgatcgccagcacgccgcgctcctggaaccgtaatacgggccagtttgaagatggtcaggccttgttcatgcgctgcagcgcgtggcgtgatctggctgagcattgtgccaacagtcttgcgaagggcatgcgtgtgatagcgcagggcaggcttacgcaacgttcctacgaggcgaaggatggcacgcagcgcacggtcgtggaattgcaggttgacgagatcggcccatcgctcaagtatgcgacggcgcaggtgcagaagatgcagtcaggcggataccagggcggcaacaccaatggcggtttcggcgggaatggctatcagcagccgcagggagccgacccgtgggctgcgccaaccggcacgcctgacagtttcggcggtttcggcggagcgccggaaccggagtgctaaatggtgccattggcaggatacgacccgccagcatggtgcgaacggcatgagtgcccctactacggacgctcatgccccgaatgcgaaacggaaacggaagactactacgcggacatcggcgacgccaatgtctgggatttggagtgaacattgttcgatttcgacgtttacggggaaccggtcgcgaaaggccgtccaagattcttcggcacgcacgccgtcacaccggaacgcacacgcacacaggaagaactggtcgcaagcgaattcctacgacactacccacaggcgcaaccgttgaaaggcgaagtcatgatgacaatcgtcttctacaaaagccgccacggcaaacccgacttggacaatctggaaaaactcgtcaaggacgcgttgaacggactcgcctacacggacgaccagcagatcaaactcaccctgtgcgccatgctcgaacccgaccgcatggcattgggcaaacgtgtgatcggactggtgaaacgacggcagggaatgccattgacgtacggcggcatcgaatacgagccacacacgggaatccacatcgaaccattgggcggaaccatccacgacggcatacgccatgccacggaaagcatgaaaggactgttgcatgacgcgggcaacgatgcgcgatatcgatgaaatggatttcaacatccaagtctgggattacatgaactgggctttgggagacaggagccttggtttcgacaggcggttgcattggatgggcgaaccggtcagtgtcaccacgctccgaaacgcggataaaccgttgtcggaggtgttggacgaagcccgcactgtcgccgcggacaacgacatgcgcgtctgggttgtagtccaacacgtcaccggcatggatgtcacgggaagcctcgtgctgattccaccggaagcatggacgcgactcagccaactcgacacaaaccgggaactcgacggaatccactttatccagctggctgtcggcaacgggctgggagtggtcagcctctaccagttcgcactgctcatgaaccatttccaaccgctcggaccggacgaatcgaaggaggtttgacatggttgaaatccgccaatcctcctacatgtggcagaacgtgaaactcaaccgcatacaagccgtcctgctggtggcattggtgcgtgacggacgattgccggacgtggactgcgaatggtcgaaacagtatcggacgatcgacgctttggaggcgcgcggactgcttgtcaagcatgatgacggactggtggagcctaccggtttcggacgtgaatacgttgaccacatcctcacgccggtggagacgcatagcacggcgacatccaaaagattcaacaagtactggaacgaccagtacgcgcatccgaaaacataccactacaagccggaacggttgcgcgtggtgtgcgctaggggagcggaatgagacatcagcaaaccatcatcgacaaggacagatcatgaaacacatcgtgcagttcgccatcggcattgacgacaaggccattcagaaccgcatagaggaatacgcctacagggacgtgctcgccaagctcgccaaaaacgccgtggacagtgttttcgcgcacacgaacgcgtattcgcgggacatcatgtggaagagcctgatggaggacgctttgcaaagcttcctcgaagaacgcaaggacgagatcatcgacaaggccgcgaacatgctcgccgaccggttccaacggacgaagaagtatcgggaagccatgggtgctgtcatcgaaaaggacggtgaatgatgggcggattgggcgaggttgataaagctctgattgtcgcgttcgcggtggtcatcgccatagcccttttgtctggactcggcatctacgcgtctttgcatgtggccacgcatcccagttacggcatgacgacggtcaagaccggcgacgtgacatgggtctgtctgaccgaccatggcacgaccatcggctgcgacacggtggaggaataccagtgaacggctacatcatctggccgaagggtgacatgagactgtacacatgccgagtgtacaagacgctccaagaggcatcggatgtggctcaggagcgtgctgacttccaccacaggccgtatgaagtgcgcgcagtcaacgagactacgcagcgaatcattaagaccatcgaaccaaggagacgcaaatgagcggaaaagtgcgagtcggcacgaacaagttgacgttcaccgtgagcgcgttcgattatccaagggaagattttgcgactgctgtcgtggatgttccagtttacgcgaagccagacaacattctcaataaccagcgatcaatgtcggtcgaagccgttatgccggaagatttcaacgagaaggtaaggcacgcattgcaagtgttcgccgacacgctcgaagcatcattcaaggaggaggccacggatgttcgacagaaagcataggaaagtccgatacgtcaaatgcctatactgcggcaaaagcccagtcatcttggaaggccgcagcttcagggacaagaacaggatcgtcatgcattacgagtgcccagccgggcatctgaccacaggcgacacgccatatccacgcgaagcattggacatttggcttctcgcagtcggcaaggtgctgaaagtcgatgacgtgatatgcgactacttcgccaaacagcaaaagaaggaggcaggctgatgaccgagcatgaggaatactgcgtgagcatccgcaaatcctacataatgcccgaccacacgctggaaggatacacggtgacgttatggaggtggaaccctctcgacgaaacatggtggtatgcggccatgcgtgactacctgttcgcggactacaacggcagtcgcaggaaggcgttacggcaggcgagacgggacgcgagaaaactcgccggaatattcaactgcactaactatgacaccaacgaggaaggaatgtggcaatgagcgtgctataccacggtggggttccagacctgaaacccggcgacatcatcgaaccggggcacagtcgagacaattacgacgattgtcccatctgccgcgccagacgcgaaaaaggcgcgtctgccatcggaggcaccggccacccggaacaggtgtactgcagcagataccgtgactacgccgcattctacgcgtcaatgtacggcaaaggcgacgcaaagcatcgtctgcatggaagaatgctccgaactcatccaagccgtcagcaagcgtcttcgaggcaagcctgacgccaccgacaatcttgcggaggaaatggccgacgtgatcatctgcctgtacctgctcaaggaaatgtacgacatcaccgacgagcagttaaatgaatggatcgcacgcaagacggcaaggcaatccaagcgaatgcaagccgatgacccattcctggaaggcaaggacgcggaatgagcgcgtaccaacctgttcttgaccctgcttgcggcgggcgaatgttctggttcgacaagtcagacagccgtgtgctcttcggtgacgtgcgcgacgaaagttgggaactatgtgacggacgcagattcgaagtcaagccggacatgctgatggactaccgcgatctgccgttcccggatgagacgttccgtatggtcgtgctcgacccaccacacttgcgcaatgcgggagagacgagctacatggcgcagaaatacggatgcctcgaccaagagacatggaaaaacgaccttaagacaatgttcagcgaatgctttcgcgtattgcagccttgcggaacgctgattttcaaatggaatgagacgcagatacccgtctctcagatcctcaagctcaccgaccataagccgctcttcggcaacaaacagccgaaccgcaccggaacacattggatcgtcttcattaaggaggatacggaatgagtagggctgaaactaccgccatgctgtccgagctggttgagaagcgtctgaagaaccgcgtcagcttctgggcaagcgaggtgaatttcgacttgggcacctcgaaaaacagacgaatcgactttatgggattcaagccgttcacgcccggctatgtgctcatgccggcaagtgtggaacttggcgagttctcctgttacgaagtcaagtcctgcatggcggatttcaaatcaggccatgggttgacgttctacggggacgtgaactacctcgtgaccacaagggaactggccgaggaactgcgagtcaactacctgctgccacacaatatcaatcaagtgctcacaccatcgaaaaaaggcgacaagctcgtaccgcttttcgacgtgtccggcaagtgcccatcctacaggtgccgcgccgcaagcgaaatgctgtacgcgatgatcgaagcgaacggaaagaggacgaattgagcatcatgcttgacgaggccaacgcttacgagcgtggcatggatgatgatttgacttttcagacggttcgggagattgccggtacggcgtacatggccggacggtccgctccaccaactgccgttgagattgaggccgtggcgaaacggctctgctggaacagctgcaaatgggatggcgtcgatagttacgcggcgacagacgaggatgacgcatggaattatgccggtgagattcccggcttccatgaggaatatatcagacaggccaaggaaatgcttgaaatagcacggaaggcggcaaacgaatgagcatcgaggacagggctgaaaccatcgccgtcgccgtcgcggtaatgttcttcgtcatattcatcgccttcatcggctatatctgctgggctgaagcgacggcggacaccatcatcctccgtgatgacggacaatcatacgcatgtcagaccagcagaatatccccagcgccacacaactgcaaaccggtcaaggagaaacgatcatgagcatcagatacgtggaatgtgcccactgcggagaagtcgtcggcacatattacgtgacctgcccgtactgcggatacaagctggccgcgcgcaatccgacaggcatggaaccgctgtatggcatgaccgacgacgaattctacaagcgattcgggagcatgtgatggaagatgttggaattcttccttggcccccaccaagcttggcggaactcgaagaagctttggattcgatgggccacgacggaaccacaagaggagattaggcgatggctagacgtggctacgtgcagctcgtgaacggcttctatgacaacgacaagatacgtgacctcgtgcgcatgggccgcgccgattccgttggcgtgtactgcatggcgctctcgttgtgcggggacaggctcacggacggtttcgtgccacgtcgcgccatgctctccaacatcggagcgacaccggaacaggtgagggcgctcgtggacgagggaatgcttgaagaggtcgaagaaggctggctgatccacgactacaccgcgcacaatcgcaccagagagcaggtattgcacgcccgcgccgacgccaaggaacgcaaaagcaaatcccgatgtcacagcagtgtcacagcagtgtcacagcgtgacatgcgtgtgacatcgggacaaacaccagaacaccagaacaccagaacaccaaagaaagagaaagaagaatattcttcttctttctccaaagaaagcgtgaaggatttcggtgattcgcaagagtgcggcgaaacggacaggacgctggccgtggaatatccgaatctcgatctcgaatccgcatggctcgcattcgtacaacaccattacggcgaaacacgctccgtcaacgactggacgcgcctatggaaaggctggtgccaacgccgcgccaacatgagcggcatcccacaaaaaacgccacatacgcacacatgggcgtgcgaacacacgctgaaacgcctcggcattaaatcacgcgacgacgtacaagacatgaccaaagcacagcaaacggcaaaccagctcaacaaggaagaccgaaatggaagaacctgaactcaccgaacaacaaaaaacagccctcagaaaagcaatcggcgacatcattggagactacacgccgtgggtgctgatcgtggaaaccacgccacttggagaaacagccacggcatactccgaaagcgtgaccgacacgcattccagcgcgttcaccatcatcggactgttggacaacgaactaacccaacgactcagctaggttgcgttcaaaggtgcatggtagaatcatccaagccggttcaatcgcacgccataaggcactggcctaggaaaaccatacccaacgaaaggccaaaagcgattgccggaatgcaaaacccgctcatgctggcgtgagcggaaccccgaacgccaactatgccccaactgtgaaacccgcctcaccgacaacctgacatggctggcgaaacacctgccatcattggaaaacgggaaactcaaccgcatcaacaaaaacagggacatgaacggcaacggcggaagcggatactccgcaaccccgccactgcgcgaaaccatctacgatctcctgtacgagcgtgacgaacatggactggacggcgtgcagcccaccctccaggcgttcgccacatgcctaggaatccaatggatgcacgtcacgccactgtccgacctcgccaaacgaatcctcgacacgaaaacaggacacacccactacctgctctccacggcaacacccgtatacgcggaacaaatacgcatcctagtcaaggaatgctcacgcatcctcaaccaaggacacgccgtcaacctcggcacatgccccaacaccgactgcaacacgccactgacagccgacgaaacggcgaccacggtcaaatgccgcggatgcaagaacacgtggaacatcaactacctaagaagcatcatgaaccagaaaatactcgaatcagactacacgggcaccatgcgccagatcatcaacctactcgcacaatccaccggacagatcgtcaacacgaacacgttcaaaagctgggtgcaccgcaaccaactaaaaccagcgggtggaatccacggacaccccacataccgcatcgcggacgtatatcggctcctgatccggctccaacaggccggacagacaaccgacagcgtatggcagctgctctccaaacagaaagcagaataatggcacgaatcatcatcgaagacaacggacacacgatcacatacgagaacgtgtccaacatccacgaccggcaagaccggagcgccaccaccacaaacatattccgcaacacggcagaacgcaccctgcatacgctcacattcctcacgccaacggcaaacagcatcctctgaaagaaaggcaaaaaatgagcgaaatcatgcaaatcaccggcaacaccgacaacatcgcataccagcatccacacgacgccggagccgacctgaaatcatgcgaggacaccatcatccccgccaacgggcgcacgctcgtgcacaccggcgtatacgcggcaatccctcacaatcacgcgggcctcgtatgcccccgaagcggcctcgcgctgaaccaaggcttgaccgtgctgaacgcgcctggaatcatcgacagcaactatcgcggcgaactatgcgtgatcctgcacaacaccagcgaaagagccgtcaaaatcacggcgggacagcgcatagcgcaacttgtcataacgcccgtcgcgcacgtgaaaatcattccggaaagccaactgccggaaaacacggaacgaggcgaaaacggattcggcagcaccggcgaataagccgacaacactcgtaaaacagacactcgacaaccctggacaggaacaatcatgagaatccacatcgtcaccgctgacgtgcaagacaaggacagatacagggattacacgaccctcccaccggaaaagtatccttatctgccaactgttcgcgaggatacggaagtcaagtatggcgagttcgtcagcatcatgggtgtttacggttcgcgtgaccgggcagaacatcgcgtggatgaacttgttcgcgaaggcttcactgttttcccgatcgtcgaatgcgttgtggacgcgaactgttggaaatacataggaggccacgcggaatgagcgtcgccgacacgacacaggacaacaccaccaaggaggcacaatgaaagcactcgacttcaccaagaagaaaagcaaactggtagacaagctggtaaaactcggattccattatcaaagcaccgacaaggagccagctagtctgcgaggaccctcacgactgataaccacatgggcgaacgtcatgaatggcgtgaccctgcaaatcatcgatgcgtatgacgcacgccatggcgaaaactacgaactgattacaacgaagcgcaaatacgtcaggataacggatgattgcactaacataagcgtcaccatgtcgttcgaagagttcatggaattggaagagatcacgaacagcaatggcagcacattcccacgcccggaaacatccttcaaaagaattactaacgagaactaggggatacgtgaaatgagcgagacaatcaaaatcagtggaaagtgagcgcgtcatgcgaatctacctagtaactgcgaacgcacaggatcacaacgaatacatcgagtaccgggatcaaccatataatcccgattcgttcactgacaccccaatgcacatgggcgaaacatcatacaccgcaggatttgtaagcatcatgggcgtttacacgacacgcgaacaagcggagacacgcgtaaacaagctcacccgcgagaaattcccggacttgcgaatcatcgagattgaagcggactctgactgttggcagttcgtcggtggaggttggctctggtgaacaagcaaataatcacagcggaccatctgaacgccacgcacttgggcaagcgaatcaccatcaacagcttgcatggcaccgtcgtgtcaggcaagctgaaagaaatcagcgccgactacgccatcatgcccagtttggcgtcttacttcccctacaaagaaaacaaaacattggagtacagtaaggacgttcacatcatcttgcacttgtcgaaccaagtcaacgacgatatcaaaacaaccgtacgcgaggacacggaactacaggtagaagacgaacaggtagaccattttgttaacgtcttcggcaaaatggtcagactcgaaaaggagacacaatgacgtcaccaaccaccaaagaactgctcatgcgcgtgatcgccgtggaatcaccgaaactgttcgacgggtcagacaacgagccaatcgaagtgacctcctactcctatcaagaagaaggaacgcgtctctgcgatacatgcgactatccggaactgctgttcataggataccggacacgcggcggaaaaacgaaacatctaaagtatgaatacttcggcctaccaaacctgctcgaaacattggacaagtgggataggcaacacgacgatacgaggaagtcagacgcatgaaatggttcaccagcgacctgcatttcgcacacccattcgtggccgcgctacgcggttacgcgctacccggatacgctcgcgacgaatcaatcaaacaacaggctgaacgcgacggcagacagctcaaggattgtgttgactggcgtcggcacgacctcgacatcgtacaagcgataaacacatatgtcggcaaggaagacgaactctacatcctcggagacatcagttccggcagcacgtggagcgtcgaacaggcgataatgcgcatccagaatctacaggtcccacgcaaacgcagacacctgattctcggcaaccacgaactctacgcatccagccgcacgctggaaaagttggcaagcgtgttcggggaagtcggaagagtcggcatcaccgaaatcagagacgggcggggcaacaatccacacacggtatttttaagccacttccaatggcgtgaagacttcacgcaaagcaaaccactaggcgcagtctcaaccaattggaacgcgccggaattagccgaatacgcgataccacgcatgaacaacactctgctcctgcacggacatacgcacgcgtatgacccgcttgagttcggcaggcatcataatgagatcaacgtcggattggacgcatggtgtttcgagccagtcaacgaagccgaattggtagacaattggctacacactgcgttaaacgtaactgagtgatctacaatggcacatgaatgggggcggattcaaaccacccccactatttttcagtaatcaacacccttggatttcaattcctccaaaaaatcatcccactgctctctcgtcggaatactcaatcctgattctggatgccaacgcgcataccagccaatcaaacaatctccctgcgcacgttggaaaaatccatcaagccaagacggatcgtccgcttccctacgcgcaagttccaaagcctccctgcaagccggttccatatgatcttcaaaccactcaacatccgcatccgtgcttgaataaatggcgtgatagatagcttccgggttaacacggagcgacaccaacatctcagccttcacacgtgtcttaaattcttcacgtctgtcccaatcgtacattccgtcagcaatcagctgcttaacatacgggtcacaatgttcagccaaaaaccacgcacggtctgtaatatctctaagcgtttggaacaaacacctcacatcgtcggaaagcgggccgacccgtcgagggaaatcactcaatctcatttgtcaatccttgtattatcagtgttttaacgagtgttcgcaagtcgctggaatccggtttcgtcatcctccttgcccaggtaatcctgcaatccatcgccagccctgccattcagcccgcgacgggacatgtcgtaatagtcgagcatctgcggactgctccacccgcctgcggccatgatatccctgtccggcacgccagcgtcacgggagagcgtgcaaaacgttcgccgcaatgaatgcggcgaaatatccggcacgcccacacgcaatgccacggacgatacgatgcccactgcagtctgctgtcgcagacgcgcgccggaatcctcacggaacaccgcaccatgcctacgcccgccaacgagtcgtgcgagagcctcggacgcctcggagggaatggccacacgctgggaccagtcgcccttgcggtcgaaccgcacccacggacgcccgtcatccagatgacagtcttcgacatccaatccgagcgcctcgccgaccctcgcaccggtaagcagcagcagactgcacagggcatccgtccgcgcatccatgccacgcgcttcggccagaaaaagcctagcctgctcgcgggtgaggtacgagccatccgaatgaccgtacattttcggcctgcgcacatgctcgcccggatcgcagtcgatatacccctcctcgcaaaggtagcggtagaggccgcaaacgacgctcagattcttgtacaccgtgtttttcgctgctggccgcatgtcgtcgccataggcggcgaacacctcgatatgggtgcgcttcgcccgcagcatgtcgatgccattatccgcacaccagcggagccatcgcgatacgacgcttcgataccccgcccttgtgctcggcgacaacccggcgagaaaaccggcgatcatgtcgctcaccgtttccatatgcgcaccgtctccttgcagatcaaaggcttatcagccggacccttgacaaacggtggtatccactgcctacgcctcagcgaatgattcggaccatacgcctgatccctccagaagccgcgcacgatgaaacgatgcgaatactcacgtcgcacccgctcgtcatcatcggcgcttccgcccggacgatgcaggttctcacgcagcaccagcatcttgaccttgcgtatttccgggtcgaaacgctgcggcaggggatgcgccatatcgggtttcgccggttttgcctcgcagatatgcggttccgcgctcaacgcccacaccgcgtgcagcaggccgcagagccactggaagctcccgtcgttctcgcggacgacggagggggcgagcgagacgacggggaggccgaatgaatcggcgtgcatctccctgatccccacgggattgtcggtgaacaccgatatcttgacgctctcgcgccccacatcctgccataggatcgcggctacacgagtttcgccggacccgtcgttatcgaagcggaatgagatgtgctgcacgtcgccctcgaaaaatatcatcccgcattgcgccggcggatcgggttccggaaaatctccggcctgcacggtgtcctcggccagacgcgtcatatctcggctgacccaccacaattgcgcggttctgatctgatcggtcatgctccaggcgttggccatcatggcctcgtattgagtttgcgagccgagttccccaagcctgtattgggcgaagtcggcgagcttgtcgcggatcaacggcaagtgggatgggataagcctaagtctgctacgcttggacatcacgcccccctaacgttgaaacagtgtcagcgtcttcgggatacacgtatctgaccgtatagccttccgcctgcaatattgcaccaatctccctcgaacgcgcgttgacgacactataaacagcctcgtcacgcccaaactcgtcgtaatgcgcctgagaacgatagtacgtcaaatcaacatggtcaggcggattgccttggacttcctcaatcccgtccaccgcatccaacgcggcctcgaccgcttcgacatgctgcgagagcatgcgttccaaccatgcctgcacgtctgccggtggttccgcctcgccgggcttctcccaacgtttcaccgtcatcacggcattgccgaaacggtcggcaagcatcttctgactgatgccgcatcgctcccgtgccgcacgaaaagcggccttcgatccaaacgtcatacaaacctccagacaatcatgaaaacacggaaaacgtcggttccagcatgaaaaacacgctggagccggcagaacaacgattttcagcggaatacgtcacgccttgacgcaatcgaacaccagcaaatcggaatcatcggaatccgttccgatcttggagtcaagacgccacccgttttcctcaagacaccgtttgatgtcctccgtccaatcatccgcctccacgtcggacggggtgaactccaagtcgtccacaatctccctatcctcatggaaatcgatgaagtaatcgtagatgcggatatggaacgtcgaatccacgtcaagcgggttcctgagcaccgcattgttcggctccatcacgtcgatgtaggcgttgtgggcttcgatgcgctcggtccatccgctgatggtttcaggatcgttcaggtcgatgaaccagtccatgagctgctcggtggtcaacgtgtctgagtaagccgaaagctcttcgtacagcttgtcgtaatcggattgcgtggactcctcgtcagcgacgagccgctcatacttggcacggagccgttcggacgggatgcaaagccatgcgtcttcggtttcgccgtccttgtcgagctggcaatcatagacgcgatggcggagctccgacttcgggaactccagtgcgaatgtgccagtctcattccacttgtggcctctggttttttcgatacgaatggtaatcatttcaatctccttgtgattgtggggatgccttgatgcttcccgtttgttgctaactacaatatatgttaccaaaggtaacatttcaagttggtgtgtcaccgacgacttcgcagccggggatcagtcctcgacattccaaaggcaatcgccgtattcgcggacctcgcctatggtgggcgctccaatcgtgcccatgggccggcacgccatgcgattgacgtcggccaacagtgcggcccggtcggtcttctcccaatcctcgtacatgccggacgcccattcgcctgggcggatggcgattccgccatcctcttttatcgagatggccattggcacgccattgacgtcgatctcggtggcgtaggggttgacggtggccttctcctcgtcgtaggccgacgcgaagaacagttccatctccgtttccggtgctcgatgctggaatgcgaaccattcgtcggcatcgtcgaagagtcgttcgatggcctcttcggatggaagcgagaccgtctcgttggtgcagcgcgtggtgaatgtgatcgttgccattttcgtgttccttactgttttggtccatgcgttcgataaaacaaaacgccccgaccgaagtcgaggcgttttgcgacatcaaaacatgcctgatatgcatttttcgattcacgcatattacacataatttcaatccacgcgcttcgaattgagtcgaagctatttcaaccggacactcgccattccggtgcgacaaaagttattatatcacacgtcgtgtccgcaggtgtgggtgatgccgtagtgtgccattttggtttgtcctttctttttgctgacatgatttttattagaatggagtaataaacgagtcgggtgtatcgaacaggctgatatcaaaaaacatgcccgaccgcgcatgatcgttgcacatccacctgcgaaccctccaaaccggcatcatgaataagccacgcctccaactccacgtcaggaatcacactggaatgaccgtaagcatacaagaagccagtcggagtcgtgatttcaagccgatacccgccaccagagatccggtaatatcgcagccgccacatcacggcacctcgatctcgtcacgccatgacagcatgtcgcgcgtaatcatatccccggacgacacctgcacgtaaagccacgcacgataacccaaccgcgcctcacgatcacgttccaaccatgcggtcagccattccacccacaacgaaacaggcgaacgatacctccacatgtcacaatcacgcacgcgatcatgacaaacaaactgataaaccgccatgacaaacacccctctcacttaagcccatcgaacatgcgcgagtaagccagctgaacattcccaagcccactgcagtacgcagtcatacgatccgccgccttatccgacatggcaagccgcaaccgcctatcattcggaaacgcaacctcacgcaacatttcatcctcgctcaccgaacgcatcacgacatgctgcggaaacatcgcatcgaacacgcatacgcacaacccgaaagcaatcaactcggtttcatcggacacgtagcgaaaatcctgccgggcacgctccaaaacatgcacgcgatcaaaagacgacgaatccagcaatccagcgaactcacgaatagtgtcatcatccaagccgccgcacatcggctcaaactgcaccacatcgatcaaatcatcccgcatgtcgggaatcaaaccgcccgaaccaatgtcaggcgtgtaacaatcattgaaacgtgcccaccattgaccgacaacccgaacgacatagccgacaatctcggacggcaacggaacattattagaggcttccatgatacaatctcccttgcaattggtttattggttttctaattgattgcaatgggggcatgattcgctgagatcacgcccccaaacttctattacggctcaacgccattcaacggccttcacgccatccaccagcacgtaagacacgccactgtggttgccttgacgccgcgcatcccacctgcacacatgctgataggcggaacccccatcgaccgcgacggaaccatcctcgacaaaacaagccggaatatccgcccacgggaacgcggaagcgacggaaccgggattgccacgacgccacgcattccaagactctacagtctcagccgacgcgccacccaacgcctgggcctgatccacggattccagatgaccgccagcacaaacagctgcgacaatcaccgcaatgagaaaaacgttacgaaccttattcattagcatggtttgcttctttccggcagaccatgtaaactgtggtctgcctgattatttttgttgagaggtaattaaggcgccgccaccgcccttaacggtgacggcaaattcttttatgcggcaagcttgagattatggcttgcgagatagccggcaatctgctcttccagccgcgcgtcaacgtctgtgtaatagtcgcgatatgcgatcacaccaccggtaccgtcgaacgcgacatacgccacacgacgccccttgctgtcacggaagccacgaggcttatgcacgtaagcgccgaacacgtcggatagttccttaaccgacgcgccgccaggaatcaccaccttgcgcacaatgatcgcgctggaagtcccgacaacctcatgcggttccgtccgtggtggaacctcgggaatctcagccttgacaggctcaggctccacaatctcaaccgcagccgattcaggcggggtgaaagaacgcaacgcgcggataaacgccgcagactcacgatcagacgaaacaaaatcctcacgataatcgttgaacgcctcaagaacaccacgcgggtactcgtgattgtcgaaagcgtcgatatcgcgcccgtaatcgatggaatggccgctaccgtcagcatcgtagagaacgccgtaaatcctatcgaactcgcgcttgaactcggcaatggtatgcccgccaagctcactcatgggctgctgtgtctgtggaacagtctcagccggttccggttccggttcgacaacctcaaccgactgtgcgacaggtgccaccggttcgacaacaggcagatcatcataagtctcacacatctcaggatgatcctgctccattggagtcagaaacgacacgtcacgcgacacaaccatgcccccatgctcccacgacaacacccaaccacgttcacggtcaacatcaggaagactcaaaccgtgagccgaataatcaccacaatcatcggacgcaatcaatccgccacgttccacgattgaaggcacgtcaccgatctcacgaacggcctgagcataatccgccccattagggtcaagccacacaccgccatcggcacggtatgcggcggcaacaccacgcacagcctgagcattgacgacacccggaaccatccgccacgactcgacgttatccgacatgccgaaacgccacacgctcggactgtcaaccgaattgaaaaacatgaaaacaccatcggaattgacagcccacaagccgttaaccttattagacatttcaaaccccttaaaaagaaaaacgttgaaaaacaaagggcatgacacaatcgccacgccccgaaactaaacaaacagactgaatgaatcagacaccagcacgcctacgtgcagcggcctcagccttgaagaacgccgcgaaagcgtcaccgatggacgcataaaacacgccatcaacacgccagccgtcataacctttggaatcatatccacgcagatcggaaagctcagcgcgcataagcggcaacgcctcacgacgcgacaccgcgctacgatgccaattattgtcgaaacgatccgcagcaacccaagcgtcgcgttcctcacgcgagtcaaaagacaacaggctacaatacggctcaccctcaaaattagtaacgccgacaccaaactgccaataaccggcataaaaatgaatacccataacacacactccattcgtgcaaaaagattgatttgatgggcgtgattgataggctcacgcccgaaagcctggaatacagggagactacttacgttccccaccattcaggaagtcaacgaacttgtctctagccacgccatcgcactcacagccgagaagatcgctgctgagcacgtcatagccacagccggtaacgaaatagaaataccaatcatcgccaccacggctcagccaacaggaacgcacgtaccccgtaagctcgtaccgtttgcactcgaaccattcagccagtccctcggcaagcagagaatcgaacttgaaacggccaacggtgataatgctgttctcttcctcgcataccctttcatcggcctcttcgtccagctcgccgtcaagactgtacccggcttcaagcgtggcgagattgcgcaacagctcgtaggaatcggtaccgtcgaacgtgtcatgttccacaatctcagacgtattaaaccaagtgatctcgctgtagatattgtcgtcgaacttcatttcacgcctcactctcgcaataggattcaagccgcgccacgcacgactcatcgcccggaacccggtgcatatcaagccattgttcagcagtgaccacggtataacgctcacccagttcgccgttgcgcttgacattgcggctgaccacatacaccatgccgtcaacccaccgaatagcgtccgcattccacgcaacgtcgcacggatcaatgccgtgagcgtgctggaaattccacgcacgattacgccgcgcaatctgagccgaacgcatatccttgcaccattgcacaagatcgtcataagcaaacatgatgcacctcactccgcaagcagttcggaaaccgcattgccaaactcttcggagaaaagccaggtgcggtagaaaacctcaagttcttcaggattatcaaggggcgcgtcatgcgcgtaatcgctggcgataaacccactccaatcatctgagaacatgacgttttgcatattctcggaactcttgctagcgttgcacgtccaggaaccattatcgttgccagtaacaggaagctcagcgtcgtcatactgtccccagcaccattgctcagttggcgtaatgccgtccgcataatccttgagggtttcaacaatttcatcccgcaagtcggaacgatatgccgttgcaaaagtattttcatcacacatttttgacactccatttccagcccccttgctagaatgagagggctctagtcagattggttaatgattactgagcaattgagccggatagttgcagctatccggctctactcattcgtgagctagccacgtcgtaaagacacgtctagccctggcggattacattcaatccgccgaagtttcagaatcagaatcaagtagcttacgtggattagctacgcgcaaagcgtcacacaagcgcaaggcagtatcaagcgacaacgtgcgcacgtttcgtttcctcgtctcaatctgagcaatttcgacgtaatgcacgccgcttttatccgctaactgccgttgcgttaaaccacgtttcgttcttaattcttttaatcccatggccttgctcccttcttgggttagggccatcgtagaccactcagacagcgctgggcaattccatgccggagacagcgccacgttagcgactcaacgacggttcagccttgcataatgtgagggtgcatcatgcctagtcgcattccgccgcgtcattgtcgcgtccactcttcagttgtcaaacgtccatgccgccgattcttcggggcttccgggttgccgtcccggtctgcgtatccgctgctgtatctttcctttctcttcgttgtcgtttgcttgatggctctcactatacacgctatccagttagatagcaaaccaagacaacacagacaccacataaaccattgcaaacactagcattcatcggcgtgtcgcaaccacatgacggcgacgaaaaaccacgctgtcacgtcacggccacggccacgacgggcacgacgtccagggcacgacgtggccacgacatacacggccacgatcacatacaaaggaacgtgcccgcgcgataccacacgacacgccaaaacacaatcgcacagacgtaccaatgttgcaccatgcaacaaacacccccgtgggggagcctcccgcccggcccttctgctggggccggtgggacaatagcagaaatagcgcgcgggtttttgaaaagttcgcgcacaaaacgtgacgcctgcaacctctcgtctcgctctgcgtatggattgcaagcgtttcaaaatcaagttgtgcaaccgttgttacacctgttttgttgagtataatcatcattagatgattttggctggtgcggcattggcgtgctggctttgcaatcctgttggcacagccttttggttgtcgggttcgattcctgaggtttgctctaggtttcatgggggtagctgcctgtgagatcgatggtattgctcgaatatccccgctggaacatgtgggggataagaggctccctgccttaatcaggcggttgatgaccgaaggggaggcacggccaaacgggtgcacatgtatgcatgttccttgccgttggtggtaaagcccattccaccatgccgaacgtcctgacgacttggacgttaactaagtcggtatatggcattggtgcaaccggtagcatggcggtctccaaaaccgtcgatgttggttcgagtccaacatgctgtgctcagcctacccacaggttgtgggaaaggtcttcggagtcgtcttgtggcggctctagttttagctgacccgcctagtctgcgggaacagtctcctgagtcgctgtggcggctcttgcttttggatgcttggcagagtggcttattgcaccacctcgctaaggtggcgactgggaacggtccggggggttcgactccctcagcatccgcgcgccgtggctggcggtaaaaagccattttttgccattggatttccttttggcggtttgggttagatgacagacaatccccatggtttttggtgatgtggcgtgggggttgcctgttttcttttgctttggtggcggaatggtagacgcggcgcactcagaatgcgttgtcttgtggcgtgagggttcgattccctcctgaagcacttgggttggctgttttgagaacttttcctgctgggttgtttcccctttggtttgatttctcctgctcagcaccggccaaccctgtttttctttgtgaggttcatatggtttggcttggtgagcgtaagggccggttcaatcctgattggcctagggttcgcgccttcatattggatcgtgacgagcataggtgccagtggcctgttgaggatgattacgggcgtgtgcgattgtgcggtgcctatgcgaatcaggtggatcataagaagcgtgatccggttcatgatgatgattcgccggagaatctttgggcgttgtgtgacaggcatcattcttacaagactgagcttgaggccgctgagcagcgtcgtgagaaccgtcgcaggagggcggaggcgaagtggtacaggcatccggcgtttcattagacgatggtgcatgctgcatcaatggctgttcgcgtgacgttcatgcgcgtggcatgtgcaggatgcattacgatcggtggcgtcgtggtgtcatgggtgcgcgtaagaagcgtatgagccgtgcgtgcatccagtgcggaaggttttttgagactgagcgcagggataagaagacgtgttccgacaggtgtcggaaggcgtggaacaggaaatgccgcaggtctccggttcgtttggattccaagccgaatccgttgaagtcggtgttgtgggagccgagggcgaacgctcgtgtcgatgtgccggttcccgttgccaagtctttctggacgcgcgatgacgagtggaactcgtgttctcacacgtgtcctaggtgcgggctggcgcttgaccggtccgctgatgttatgagtggcgattatccggttggcgcgtggaaggtgcctttggagcaggggggagagaacagcctgcgcaaccgtgttcttgtccatcgcaaatgcgcgtgatgccggaacggctttcgcgctgatgcccggaatgggtgtgcggaggtggtttccatggcggctaagaagcagtccaatcagattcttgaggttcccgatgggaagcttggacccgatctgcctgatgcgagcttcatgtttccgaagggtggcgaatggtcgcctctggtggagcattggtatgaggagttcaggaaaagtccgaacgcgtccatgcttcgcacggcgcccgcgtggatggctgtgcagttgggtttcgccaccatcaacgagatgatctggtcgaaacgttacgcgacgttgatgccggtcgtgcgtcagctgttcgacgagttgggttggactccagcttcgttgcgcgctttgaagttcgatgttcccgaaagcaatgaccatgcggccaccgatggttcgaatcatgccgtcatccaggatatcgacgcatggcgcaggaagttggaagctgcccgctgatgcatgtcatgattccaaagctgtcctatgaggacaggtgccggagtctgggcgcgttgttcctttggtggacggagacgttcgtgcttatcgggcgtggtgacgccacaggtgagcatgtcacccattcgccggagtatatacagttcgcgttgaacgcgtatgcgcttgacaggaatggtcggcgtaggttcgaccgttgttcgctgtggcgtccgaaaggctgcaataagagcggtcttggctgcgagttcggcttgttcgaggctttggggccttgcaggttcgatcattgggcggtggctggcgaatactacgagttccttggtcagcgttactactatctgcccggtgagcctgttggccgtccggttcagcgtcctgagattctgtgccttgccaccagcgaggaccagacgggaaacatcttcgattcgatccactacaactgcaaggaagggcctttgtcccagttgcagggcgaaggcatggtcgtgacgaagaccggcatctcccttccggagggcggggagatagtgccgtccacttcgggcgattcgtccaaggacggcggtttggagacgtttgttcttgcagatgagattcacttgtacaagctgccgcgtcatatcagcatgtacaagacggttcagcgtaatctgccgaagcgttcccttgaggccgacccgtggctgttggagatgacgacgtattatcgtccgggtgagaacagtgtggcggaatccgtcgagcagatcgcgcatgatattctttccggcaggtcgaagcattataagggcctgtatttcgactatcggtattcgacgcttcctcttgaggagttctcggatgagaagaagcttgagcacgcgttgtacgagtcgtatggttccgcggctcattcggctgatggcaaggattatgtgcttttgccggatggtcgtatcgaaccggtggatgatgacgggtatacggtcgatggtttctcattgaaggatgatggtgtggagccggggccgtctatgaacgggtgggtcaatatccgtggcctgatgaatcagatttaccagcctgattcggacgtgaacgattccatccgctattatctgaactcccgcgcgtccagtgaggattcgtggcttaccgaaccggccattcagtcgcatgtcgcgtacaaggcgcttgtggatgattgcatcgaggcgaacattggccttgatgatgtgtggaagcaggtggtcaagccggatgacgagatcacgttgggtttcgatggttcgattcgtaacgattccacggcgattgtcggatgcagggtgtcggatggtttgctgttcattgtcaggttggagcagaagcctgacaatccgcttcctgactggcgtgtgaaccgtgatgcgttcgatgcggccatgcgcaggatgcttgacgggtacaacgtgatcggcgtgttcgcagacccgcatttcttcgagtcgatgatcggcgcatgggaatccgaatacgggcgtgacatgaaggtgttcgccagaggccagtcttcgatcatgaagttctggacgaacaattggggtgtggacatgtatcacgccacgcagaacgcgcataccggattcgagtatgatcccgagcccgtggtggatggcaagccgaatccggagagcatcagactgttggccgacccgaggcttgtcgggcatttcaggaacgcgcggcgcagggataatgcatacggttacgcgatctacaaggagactccgaagtctccgaagaagatagatgcgtgtatcgccggaattctcgcgtatgcggcgcgaggcaagtatctgagccagttgaaggaagaggagaaggctcgtaccaccgtggagcgtgtctccgacgcttccggtgcgacgcttcgaggtccggcctacaagaggctgcaaagagcgaattgaggtgtgtttgaatggcaaacaaggtcaacagccttgtatcgggcgatgaggagccgggcggtgacggtctgatattgacccgtctcgccacgcgcttgcagaaccgaaacccgcagttgtgcacgttgaagacgttctatgacggtcgtgagaccattccgaccaagagcgtgccgaaaaacatggatgtcacgtccacgagcgtgtacaagcgtttcgtggacatgtgccctatgaacctcgcgtccaccatcgccaatgcggtgataacctcgcagcatccgacaggtttcaggctcgtgtcagacaagacgatgcgtagcaccgatgcggatgacatgtggaaccgtagcggcatgaacgtccgcgcgttgaacatgttcatggatgcggcgatctatgggtgctcgtatgcgcaggtgtggccgaaggcgaacccgtcctacatttcgcggctcagcccgtggaccacttgcttgtccgatgataaggattcggcggttgtttacgggttcgacgaggatgcgggcgtcgagtatctgacgttgtatcgtctcgtccgtgatgatgacggcgtggtgcagcgagtttattcgcgtaccgccaagcaggaggtggagtctcgcaccctgtattccgattccgttgatgacgaggatagcgtgtactcgcttgccaacgacgatacggtgaaacgcccgcggttcaaggcgcagttcgagtgggatggcggtgttaacgacgattgggatttcgcggtcaaatgcggttgccttccgatagtccgctaccagacgccaaccggcaaggggtggtttgagtcgtcgctaaggacgcttggagccatcgaccagcaacgttatcagaggttctgcatccaggagatgcaggcgttcaaacaacgctggatcagcggtgatcttcccgagtattacaaggagtccgatcctgcggtcaaatatggtgatgcgcaggccggtcagaaggttgattattccacgctgttccagatggggcctgcggcgttgtggctcatgccgaagggtgcgacggtgggggagtccggcactaccgatatcacgccgattctcacggctgcctcgcaggacatcaagcagcttgccggtgcgaccggcactccgttgtcgattctttctcctgatgttgcaggcagtgccgagggtgcgaagctgaccacgcgaatgctgcgcctgaaggttcaggatatgaacatgcgtgcgaatgatgcgtttgttctcctgttgaagatggcgctcaccgcggatggtggaagcgacgcctatgaggagaggttcgagacgacgtgggagccggtggagcttccttccgaacttgaacagactcaggcgttcgccaatgtcgcggggcggcttccgttgaagaccgctgcgagacgttacctgcacatgaccgagactgagatcgcggagatggtgcaggacgctcaggatacgagtttcagcacggtgttggcgcagcagcagtcctctcttgctgattcatccaagacggttgatgatgctatgggcgcatcctacttggatggttccgatggtctgaccggagatacggcggtggatgatggcgacgtttcagacggtctctgaggctttggacgcgcagcgtaacgcacttgtcaacgagtatgtgagcagggcttggcgcatgtggcggtcgctcacccccgccgatttctggaatgatgccgtcactcagggtgtttcggcttacatcacgcagcagcagatcgcgttcgtgaagcagatgcgccgtcttggcatctcgtatgcgaacaccatgctcggcatggtcggagtgacgggcaggacggcgcaggttcccgaatatgtggtggtcagggataacaccgacccgtggaaggtgtcggcgcgtccagccgacgcgtacaggagcttcgcggtgaaaacgccggacattcgccctcacggttgggatgatttgaacgatgccgtgtatgagactgtccaatcatggctggatgctgcggaacgacagttgtccgacaacgctctcaccgatggcgttgccgcccagaaccgtgcgagcgaggagtatttcaaggcttcgggcataaaaaggttccgcagggtcatacatcccgaactgtccaagacgggcacatgcggcctatgtgtagtcgctgccaccaacgtgttctcccgctccgacctgatgcccctacacaacaggtgcaagtgcaccgtcgcgccgatcagggacaacatcgaccccggtctgaagctgaattcggatgacttgcagaagatatacgacgccgcttccatggctggtggtggtggcagtggcacagctgcgcggaacctcacgcagttgagggtgagcgtgcgcaacgattcggaacttggccccattctcaccagaagcgactggaagcagaatgacgaggctccgaaatggcgtatgccggacacgattatgacgcaacagcagatgcgacgcatgtacgagcgtgcgacggtgttcaacgccaaatacgcggagcttcttaacagttccgacaattcattgagctttcactatgacggtcgttcctacacgttcaggaagggcgctcatgtgaaacaggcatgggattatgtgaggtccatgctttcctattcgcgcggttggcttgggctggccgcttagatttattaaggagatcaagggtggctgaccctgaggaaaagaagactgcgcccgaaacggagcagcagaacagtgaacccgaaacgggtgcggagtccgctcaggagccgaacacccagagcgtcgaaccggatacgaagaccgtcaagccggaggattccggcgaggacaagtcctccgaaccggacgatgtggccaaatggaaggccatgagccgtaagaacgaggacaatgcgaaggcgaacctcaaacgcgcggaacacgcggaaacggaacgcgattcgcttcgtaccgagaacgcgcggctcaaggtgcggatgcagtatccgcagatcaacgacgatgccctttccctgtgttccgaaacggaaccggagaagattcaggagtgggcggataagtacgcgaagctgaacccgctcgacaccgagccggcgaagcgtgatgttcgcgaggacgccttggcacgcaaggtatccactctggccgagtatccgcagggctcagtcaatccgaaggccgcaaagggcgatgcctaccggcgtcatatggaacgccagaggaacgcccgacgcaagaagaactaaccaacaagatttaaggagttgaaccttggtaatcgaaatggttcgcacgtccggtgtcgtaacccacgaggttgacgattcttggcgttacggagagaagaacagcaacgattccgtttccgttgtcatcgttcctgaactgttcaagaccactgacagcaagtatctgacaggtgtggggccgaaggccaccaccgtgtacatccgaagcggcatcccgctggcgaagatcaccagcggaaccaacaaggacatgtacggcccttatgacaagacggccaccgatggccgtcagaccgcgatcgctggattgttggagtccgaagtggccgtgaacatcacgctggctggctgggatgtcgatgatcccaccgttggtatgacgtatcgaggtgacatcgtgaagtccaagcttccggtcgtgcccgaggagggcaccgtgtgggactgcgatttctatgacgttgagaacgattccgtcacccgtcttgccggtgtcgcgtccggttcggccgcgtcctatgtccttccggccgcaaccagcaatgctctcggcggcgtgaagaaggtcgcggctccgtccgaagacactgttgccgctttgaagacggcccttaagagcgccggcatcttagcctgacgcgcgttacctaagaaacattctaaaaacccgcccatcgtggcgggttttcttatatgtaaggagattcgatggcacttgataagaccatcattccgccgagcgaggccaccgagatcgctcaggcaggtttcgatttcgtgaacgacctactgccgttcgcgcagatgttccctatgaagtccaatgaaggcgactggactgtcacttggactccgaaccttccggtcgtcaagacacgcgccatgcagcgtcgtgccttggatgccgaggttccgcacgtcaaaagcaccgaggtttccgccgagaagcacaccggactgctcccattgtccggcatggggcacatcacggaacgagaggtggcgaaggcctccaagcagaagagcgccaccgactacgtgcacgacaaggccgagaagctgtttgagcagatgggccgcgaagccgcagtcaccttggagcttgaacgtattcaggcgatgatggacgcgaccatcaagatcaaggagggcgatgatcgcgcaagcgaactcgtcacctattcgttcggccgtccaaccaaacagcagaatgtcgttcctaccgtcaagtggagcgacccgaaggcggacgtgttcgccgacctgaagaagtgggtcaagctcatgcgtaccgcacgcggacgcgcgccgcacgcggtgctgaccacctcagcggtcatcgatgcgctgacaaccaacgagcagatgcgtaccgcgttctcgaagatggatctggagcattcaccgaccagcctgttccgcaccgatgtcgagaacatccttcgagtgaagttccagctgaccgacatccgctacatcgatgaactgtacgagtccctgtcgttggacaacaacttcgagatgaacgtggacaccaccacgctcattccggattccacgttcatcctgttcccgtcctacaacgacgattctctcggtttcaccgcggatggtccgactgcggaaggccaggatgcggagttcgagttgggcaaggacgacggtctcgttgcgtacatgctgcaccattacgctccggccaactacgacctgtgggtgaacggcaccgcgttgccggtgttgcaggacgccgtatcgaccttcaaggcgaaggttctgtagcctgtaggaggttcccgtgtccagcagcatcgtgtccggtatcgactggaagaagtacatgcagttggagttggtcgatgacaggcgtctcgccgaccggtattcgaacgagtgggttatccacaagtgccgtgtcgcagcgaacatggctctggcatgcagtccgaacgtggagccgcgcctgaacaacggctatctggatgaggagacgttcgcctatgtcgtctgccagatggtcattcgcgtgatgcgatggaccgatctgaagtcggagacgaacggctcctacgcgtatgagaatcgtagtccgcaggacaatccgccatcctatgacgcttccccgaacctgtacgtgagcaaacgcgaaaagcagctgcttctcggttacgaggaggggaacgggccgataggaacggtgttcgtcggcgtcaacagaatctgggggctttgatggagggcgaaacgcttgacacggggcatctcttcgatgatgtcgatgccgacgaaataggcggcggacatctgttcgacgagttcgatgatgtcaaaaggcaggcttctgacgatctgcttcaccgtgacgtgatcgtctatgagggtatgaccccgtgggtgacgtgtcacgggagcacgactgttccaaagtatttggatgcggatggtagggttcttgacccggccacggtttccaatgtggttcgtgcgggtggtttcgtgccgtccatcaccagtggcggagtctcgtatactgcggatgttcacgaggtttactgttgtgtggtcggacgcacccagaagaacagcgtcatgagtgagaattgggcgcaggatacgactccgcagaagtttggcggtaatcgtgagatgaatcaggtgaaggttctcgcgccggaatggcatggggacttctattcacggttctggttcgacggctcatgctatgaggttgacggttcgccggtttttcttcctcattcgtccgatatggctaggcattacgagtttccggctcgccgcgtgtatgcggccgagttggctcataaccgtatcgttccgcccgttccaccgaagggggctgaaacatggggtatgtgaggcttcgtcctgatttgaatgcgagggtcgcggaaacgttcggcggtaaggtcactcgtcctcacgctttgaaggttcaggctcgtgcgaaggcgttggccgacatgcgggcgaagcattcgagtgtcgccgaccgtatcaacgttaacgttcacgctcacggttcgcatacgagcgtggtcatgagcgtgaccggccgtgacggctcgcagatcgcatcctatttggagtatgggtatttcaatctgcgtgcgcaacgtcacctgccgggcatgtacgtgatgagcgaggccaagtatggctgatctgagcgtgcgtgccccgttggatgccgaggggttggtcgatgcgctgttcaagcgtgtcgatttccgtaaggccggtttcgataacgtcgtggtgttgccgcgcgatgtcgcggatacggattcgtatgcgtttgaccatgatgtggtgatctggcattgtggcgctccgttccagccggattggaatgtgaaggcgtgggtttggcggttcgcgttgtcgctgaccgtggtgaaccgtgaccctgacatcagttccagcctgtgttcgtttctgcatgagacgatttcccgttggccttatggcgagcctaccgagtttggccgtgtcggtgcgattcccgacaatccggcattcgagcaggtcgccattggcgatgtggtgactacgaagaccgctgtcgtgcgttcctgcacgaagctggtgcaggcgggttccgtccgctgattttcccaataatccaaagattctgattttaaagccctgtccgcttgcggatggggctttcttgttaaggagggccattcatatggctatgaacgataaatctgtgtttaccagtgttcgcggtgcagcgtttcttgccgatgccaatactgctttgccgagtctgaaactgtttggtttggaggtggcgaccgttggcgagaccaccaagaagtatacgaacatgggtaatttgagcgtgtccgacctgccgtctttcgagacgagcggcggcgacgcgacaaccaaggatacttggaacaagagcaagttccgtaccacttacgattccgtcaccggcaaggtcacgatttccagcgtccagggcgacaaggaaacgttcaagctgatgttcgacgctgccgaaatcaccggtggtggcaccgcagtcgccttggacaaggtcgagcagccgaaggcgctgttcatctacgtcgaggacacgaacaccggtgagaagttcggcatttggattccgaacatgagcctcgcctatagcgagcttccgtccttggctcaggatgatttcaacacgttcaagctggaaggcaacatcatgacttccactgttcttccgaagaccaagagcggcaaggcttccagcatcgctttctatgatcctgacgatttcgccaaggtcgcgtgagtctgagggtttttgattcttcccctgacgggtgttcttctcctgtctgtcgcccatcaggggattttcttttttaccgcagacgggtgttgtctttttcacagattggagtttggtatggctgaaaacgatgttgaagagaatgtttttccgactgattgggatggtctggccggttacgatgatgtgatggccggattgccggaaatggtgcaggctgagtctttctcgccgtctcagaccgcgttgttcgctgtggtcgaacgtcgtttgaacgagcggctgcttgtcatgcgtgacggtggcgtgtttggcggcaaggcgaagaaaaccgtgtcggatgatgcggctgccgttgccgttgccgaatacgtggagatcgctgactcgttctataaggggcttgccgttgatgctgacgcttatacggagtggacgaaggggcgtggcctgtttgacctgttgaacatgttcgcggctctcacacgcttctatgtggagcgtttgggaaaatcaagcgcctcgaaaaagcagtctcggactgccgagtaggggttgtctccgattttcgtcgtttctaccggttgaatcttccggctgacgttcatgcgtatgatccgaattttctttgcgacctgttggatggtctagaggccattcccgattcgcagtggcgtgcatggctgcttgagcatgatggtgccggtggtggttccggcagttccgaacggttgcagttggggtggcttggtttcggccagtccgaaatgctgttgctgcaattgcagaacacgttggattcgttgcgttcgctggctgtttctcattggagtgggaagaaggttggctttgagccgattcttccgcccggcattgatgccgtgtctcgtgatgtcaatcgtgtggatggttcgcatgtgacgagtctggctgactatatggctcgggttcgtagttgcttcggcggctgattctgccggttttttgtttttgcccatgtttccaaggggtctttttcctctttcttccccttggattcgtgggcgtttcttttaggagtgtgcgcgtatggagcgtcctgctttttccgctggcgaggtcggcattgatgtcgttcctcttaccgaccggtttttcgccgaacttagggcgaaactgcatgatcttcgtgatttgaaggttccggttgagtttgacccggatgacatggccgcttcgcgcacgtatgagaagtggaatgggcgtgatgctcgcgtcaatgtctcgtatgacgttgacatgtccggcttgcgtgaactgtcgaagcaggatgaacggttgcgtaaacggtatgagaagcccgtcaaaccggttttcgacggcagtggtgtcgtcaagggtctggacacggcgatcggccgtgtcgaacagttgcgtaaggtccagaagaacgtcggcgacgtgttcaccaagaatcttggcgtgttcgggaaaacggagacgagccggttgaaggagcagatgcttcttcttgaccagtccgaagagaggatgcgcagggttcgcgccgaccgtgacgagcttgtttcgatgcgcggtgacgagtggaatcagctgaacaggcagattcttggcaacatgagcacgttggacgctttgcagaagcgttacgacgagttgggttccgagatttccaaggttaccgcgtatcgtgattcgcttcgtggcggtggacgccgcgacgaggcgaaagcgcagaccgtcaggcttcgtgagcttcgcgccgaataccgtgcgaccgcacgcaacatgcgcgaggtcacgaacgagacgaacaggctcgccaaacagcaggacaagctgaagtccgatagtgtcgcgaagtggattcacgatttggacaagcagcttgtcgaattggattcgcatacgaagtccgtgcgtaagactttcgacagcgtggcccgcagcgggttcttcaaatcctccgacatgggcaagacgaacgttctttccggcgtgagctttttcggcaaggatctgaaccgtcagctcaatacggaacgtgccgctcgcagggagcaggagcggctgaacgattcgtggcgtgatggtgccgaatggcaggggaacctgttggaaggcgcggcacggtatgcgcggaatctgaagaccgcttccaacgtgatgaacgcgtacggcaaggacgtgaaagaggcgaaccgtctgcttgacgagcaggaacaacggttgaccggcttgcagagggccttacgtggcgtgaacaagtacggcaggtattcggaagtcaacaagcagttgaacgaccagctcgccgccgtcaacaggctccgcaagcagatcgaatccaatccgatcaagacgagactcgtattggatgatagtcggttcaaccgcaagtatgcgaacatcacacatcaggtaggcgagttgacgaagaagcttgaacgtgagaacgagcttaggattcgtgttgatttctggactgatacggctgattcgcttgaagagcgtctgcgtaggcttcagcatgggcgtattcagattcctgcggatattgtcgttgacaataagaatctgattgagcgtgcccggcaagtcgccgaagaggtgagacgcaatccagatcgcaaggtcgagcttgaggctgatcttgatttggatatgaagcgtgccgaggagcgtatcaaggatttccagaaggccaatgacacgttcaatatggacgtggatttggagaccgccgccgcacgcgcccatctcgcttacttcacgagaccgcgtacggttgatattttcgcggagttcaaaggcaccgatctcggcaagatcatgagcggcatgaccgctggcgctactggtgtccgtggcgtgcagaacgagtggcagaagctcgtcaacatgttcgacaggttcgatgaggtcgtgccgaagtggagtctgctgggcgcggtgttcgcgtccgttggcgctggcgcgttgaacttgtcccgcacggctggcagtgccggcgcttctctggtgatgatgagcaaggcggctttggccgctccgggcgctttgctcgggttggccgcgggctatgaggtcgcgtatgcggcggcgaacaagtttggcgcatatgtggatgtgtccaccacgaagcttggtggattgcatgacaagcttgctgacacgttctggaagcaggccgcgaatcccgtcaccgatatgatgaacgcgctcggtgacagcaagtacgtcgagaacatgaacggcgtggccgacgcggaagggcgtatcgtcgccaatgcggcgcgtatcgtcgcgcaggaaccgtatgtggatcgtatcaattcgattctcggcaatacggtcaagggtgtggacgcgcttgacccgggcgttcaggctgtcaccacttccgttgtgaggcttggcgataggaccagctcgtatctgccgcgcatggctaactatgtgagccgtaacgcgacactgatggcgcagtgggtcgatgaggcggagcgtaccggcaaggtcactcaggccatggagaaggccatcgagcagggtggctatctcatgtcgagcgtcaagtcggctggtggcatcctcaagggcacgttcggcacgttggccgagggcgagaatggcatcgagaagttctccgacgctttgagtcgtgctgacagggccgtgaacggcgtgaagttccaaaccacgttgaccgcgtgggccgatggggcgaaacaggcttcgggcaagttccatgattcgttccgtgagattggcgacgcggcttatgagctgcgggatacgacgaagcaggcgttcgttgacgccggttccatggtgtccaccggcatcggctcggtgagcagtatgcttggcaagtcgaagaccggtatcgcggatttcagcaatggcgtgtccgagggattccagaaggtgttccgtgccgttgattccgcctccccgatgttcgacagtctgctgtcgatgagcggcgaattgtccgacacgttcggtggaacgttggggaacacgttgaagtcggcggctccgacgatcaaggtgttggctgacggcgcttccaccatggcccaggctttcggcaagctgcctgcgcccgttcaggcgatggtcggcatgtatgcgacattcggcaaggccggcatcagcgcttacaattcgctgaagcgtggcatgctgcagaacatcgaatccacgctgcagtatcggaagaccttgagccaattgggcatcacctcgcaggagaccgcgatcagtatgagcgagctggtccgtgcgatggctcgtctgaagtccggtcagacggctggcgtgctgaccggcgaggtttcaaatatccgccagatgggtgccgcagccgacgagaccactgcgaagctgaatcgtatgaatcgtgcgcaggctggcggttccgccgccactggcgttgccgctggcgctggttccaccggcttggttcgtggtgtcggcgaggcggctgagggtgccgcccgcaagaccggtttgctgaagaccgctttgagcggcgtggtcgatttccttggcgggcctgtcggcatcgccatcggcggcgcgaccacggcgttgagtctggcgggcagtgcgatcagttcgtacaatgatgccgccgcgcacacgcaatcggtgaaccggactgtcgccgactcgttcaagaacgttcaaagcggtgcggcggacgcttccacggctgtttccaaagccaagaagaccgtttcgaagaattgggccgacaaggattatggttggaagcttccgaacggcaatgccgtcgagaagctttttagcggtgtcacgaagtgggtaagcccgttcaaggattcgtccaaggcggctgacgctcttggcatcagcgtcaaacaattgaattccgccgcgaccggaacgaacgacgcctatgacaagatgcataagaagcttgaggccatcaagaacgaccagcagtgggtcatgggcgcgaatggtcagatggtgaacgccaacgagcagcaggccgaagccgccgaacgtctgcttggcgtgcttgaggactcccacaccgaatgggtgaagggcatgaaggtggcgtccgattggattggcagcgccgatagcgtcgccaacgtttcggcgttggccgccgacaagctcagtctgctgtccgaatccctcgcagccaacaactacgaactggaaggcaacagcaaaaacgcccagaccaaccgcaagatgatggccgattacgcgaacagcgctttgctggccgcgaagaacatcatctacgcgggcaacggcagcgccgaagcgaaccagaaagccaagaacgccgtctattccgcacgtcaggaaatcattcagatggccgaacaatgcggcatgtcagccgaagccgccgccgcgctcgctgaccagatggggcttattcccgataacgtgtccacgaagttcgatctgacgaacatggattcggtgaaggctcaggttcaggattatatcgaccagcttgagttgaccaaaggtcagaaggaaatcattcttgatctcgtccagaagggtgacataacgagtttcgaccagttggccggtgccgtgaaggcgctcatgggtggtgcgagcgaaaaggatttgatgattcttcttgacgctcaggataacgcttcgggtaaaatcaaggacgctacggctttggctaaggggtttggtctgacgaaggctcagatcgatattcttgccaaggatgaggctggcccgaagttggatgccgtcaagcagaagcttcgtgacagtgggttgactgacgctcagattcagattctcatcgacgctttggataagacgcaatccggtgttgatagtgcgaagaataatctgcataccatcgagcagacgcctgtggatgttcctattacggcagctgataatacgcagggcggtgtcgctagcgcgcagttttcggtgaacagtgtccgtcagggtgctccaacgctgatcgacgctgttgatagggctagtgttatagcgcagatagcgaagggcaatattgagaatgtgcctcgtaattggcctacgcttttcgctggtattggcaatacgtctgctgtggcggctgatgcgaaaaaccagattgtctccgtgcctacatggtgggggagtcgtcttgacgcttccacgaccggatatgatgctgttgcaggtctcgccggacagtggaacagcatccaaagtaagagcgtgacgcttgatgcgtctgttgttgctaggggtattgcgaatgctggtcataaggctaccggtggtcgtatcagcgggccgggtactggcacgtctgattcgattccgatgtggctgtcgaatggcgagcatgttattcgtgccgctgcggcgagcaagcttgatcgtactgtcggcccgaatttcctgaacgtgttgaacgctaccggtgatctggacagggcggtgtcgcaggctcgcacgtcgtacgcgcgtagtgcgcgtgacatgagccgtagcgcgtatgcgactggcgggcgtgtggagaagatgatgtccggcttgtatgaggtcaacgttcaggttcctgattcgagtcgtgaactggtgtccgccgtgaacgagctgcgtcgtgaggttgcgggcttccgtgatggtatcggcggtgagatcagtcgtaacagcagtccttggcctagcaagcgtgatttcgtccgtgatgtattggaggcaagtcgtcgtggcaggtgagcttgcgtatgtgagtggtttgaccggcaagcggttcgacgtgtcggattatgagaccgttgatttcgaaggcgcgttggagttgcgtggccgtgaatgggattacacggtgcgtaacggtgggttgaccggcgtttcgaggaaacgtcgggaggtttccattgacgtgcattatggtgatgcggctgcgttcgactcgttcatgcgggctgttgacgctgatctggccgtaggcaagccaggacggttggaggcggtgaatggtgcgggggaggtttggacccaatcgtgttatgcggtgaagtccgaggcttcctcgcatcctggttcctccgacccggtgtgcgcgctttcgttcgtcttgttggatggcgtgtggcggcatgaggccggtaccgtgtcgtatcagcctgtgtccgggtctgccgcgtctggcttggatttgccgaccgacatgggctatgatctggctgtttcgcgtccgtcatgcatggtgtctaatcgcatgcgtgttccgatgccgtttcgtctggtcatatatggggccgtttcgaacccgtcgttgacgattggcgggaacgtgtaccggttgaatggtgatgttcccgctggcgcttacgtggcggttgactcgttgaagaagtcgatcatgctgcatggtgcggatggttctctgcggaacgtgttttcgtggggtgtgcgcggttccggtttgaatcgtggacagtatgttttccaacctattccggctggttctagcgtggttgagttgggttccggtttcggttttgatctgacggtcgtcgaggagaatggggacccgacttggttgatttgatttgcgctgacgagaatggcgtgccgttccatgcggcttcggattgcgtgtttgattgcgcgtgggggtctggtgagaatgatttcgaactgacgttgtatgacggtaccgtgctgcccgaccgtggtcttgtctatgtggatgggaccgaggttggcggcatcgtcgatcatatgaaggacgaactgtcggatggcgtgagtgtggtcacgtattccggtcggagttggcatggcatgttggccggtaaggtgttgcagccggattcggggcaggattatctgaaggtgtccggccccgtgaatcaggtgttgtcgaacctgttggcccgtattggcttgtctgacgtgttcaaggttcgcgcggattccacgaagacgattccaacgttccagttcgaccggtattgcaccgcgtatgatggcatccgcaggatgctggcagcgaatgatctgaaactcatgtttcaggaggttgacggcacggtatggatgtatgcccagccgattgtcgcccatgatgatacggtcgattccgatctgatcgatttcagcatcacgaaggattaccggcgtaccaatcatatgatcggcttgggcaagggtgatttgaggaatcgtctggtcgtccactattatgcggatggttccggcaaggtgtccaatacgcgcacgttcggtgggcgtgatgagatcgccgccgtctatgattattcgtccgccgagaaggacgagttggacaagcagacgaagaagcagttgcaggatttgcagggtgccggtgctgtcgatgtgaccgtgcatgacggtttgtcgcttgatgttggtgatagggtcgccggttgcgatcatgtgaccggtctgactgtgacggccatcgtgttgaagaagatcgtgaaactgtctggcggcttgctgtccgtatcgtatgaggttggcgacgcggcttcttcgaagacggaatattcgaattacacgagttcctcttcctcttcgtcttcgggttcggctggcggtggagtgtctttgacggctggccgtggcctgtcgatttcaggcggcacgatcaatgcggaggtcgcttccgaggatttggattccgtcaggcaggtcgccgaggcggcgaacaagacggcttccggtttcgcagcgcagatcggcaaggcgaatcagaccgccgaggatgcgaaaaacgtcgccgatgccgccaagaccgtggccgacagcgccaagtcgggcatgatgaccgatggcgagcggtcgaagctcgcttcggtcgaacggggcgcgaacgcctacacgctgccgaaagcgtccacggacgtgttgggtggcgtgagggtggacggttcctcgatcgtaagcgtggatggcgtcattagcgcgcatgtcggcgacggcgcttccgggaaggtcgtgttcccggtcggctatgtggtgatgaacacgactggtgttgacccctccgtggatttcggcggcacgtggaggcagttgccttcgcttggctgctcaatgtttgaaaggattggatagtgaagtctgacggttactcgaagtatgtatgcgacaagtgcggtaagaccgcttatgtcgccgctggcgatactgaggcgcgtgaatggttcacagtgcgccgctattcggctggcaaggcgacccgcatcgcggatgatgtggcacctgacatttacgaattgtgttcccaatgcaatgcgtctttcatggcgttcatgcagcaggatgacgcttcgtttgaagcatggttgaaggaggtcggacagtgaccatcgaactggttgacggcaaggccggcacggctcatatttcaagtgaggacaaggcgatcatccatcaggccaagttttcgaagtccgacgtggtgttcgactggggcgacgcgttcaaatgctcgatgagttcgtccaacagggcgacgatcggcaccggctgcgcgtcgatacagggtttggactggcatgtcacggcggcggaatcggtgacgatttccaacgggtcgcagggcatgaaacgcaatgacatcatttgcgcgcattacaatcgtaaccccaagaacggtaatgagctggtggagttggtcgtgttgaagggttcgccgaatgcgactgccgccgccgacccgaccattccgtcagggaagatattgtccggcgcggttgacgcgtacatgccgttgtggcgtatcccgcttgacggcatcacggtcggcacgccggtgcgcctgttcacgccgaggggggctttgtgggattccgtaacccagcaatggaagccgccgtatacatccgacagcctcactctgtgtcgcgtcggacgcgtcgtcacgatcaacggcaacgtcaagttcaccggcagtggacagcagaactactcgacggcgaatgaaaccatcccagaagcgttccgtccgctcgccgacatgagcatcatatcgttcccgtcctgcggtttcagcctgcttgtcgagcgtaacgggaaggtgcagatgcttggcgacccgaaatccgcctactccacggcgcatggctgttggatgacggaatagttttccgtaaccctgtacaacgcgaagggcttcactgtcatccgcaccggcatgatgatgctggtcaaatactctggcaatatcggtaatggcagttgggattcagtgcaatgcgaatacgtgctgcccgccgaactgcgccctccggtcgaagtcaatgcgatggtgtgcgtatcgaacgggcagacggcgagaatgctcgtcgtcaatccgaacggaaccattcgatgcgcgaacatgggagccgctggcagcaatcagggttgtgttggctcgctctgctatccgattccatgaggatagttttccgtaacccttgaacggcagatctggcatgggccatacggcatgacggtacatctcgccaaagtcggcatgatggctttcgcttttggcaacacgtccttcacatccaacatcaattccaacggccagaccgtgaatgagacgatggatgacggtttcctgccggagggtgaaggcgcaatactgctggaaggtgtgaaccagcagcatggagccttgtcattcgactctggcggcaaggtcacgatcagcggcagcatgaacagcggatactatttccgcgtctgcggctgctggccggtgaaatagctttccgtaaccccgattcgtttcacgaaacttacctccgacccggaattcacaatcagcggatgcgtcgtcaatggtttggcgaccgtctactgccggtgggtcaacaaaggccaattccagaagaaggcgtgggatggtgtgcctttggcaagcatggacgtgggtgccgagctggagggcttcggcgttttcatggacagttttcagggcagtcagatgcagaatcgttttctgtacattgcgggaagcacggttgccttccgcacatcgtatgatgtgaccgttcctgcaaacacatggcatgtcggcagcgtatcgtttccagttgcgaccgtctaggcaacgatataggtcatcgttgtggcaaaaagccgccgttctggctaccgccgtaaggtgataagagtctgtggttgcggaatcccaattatgcatattccacatcgcatggttgctggctgacggcctagacgaattccacaccatcaggcaccggaatggtcttcgagaagcattggacgatatcggacgaactcacgcctccgataagcgtcaccgacccgtcagcgttccacctcgcctgtttgccatacgcggcaccagccacgttcgcgacgcaaccaagaccgaccgttttggagggcttcacgcccgcttggaacagccagacacggtaatcgccgactttcacggtgcttcggaacgaagacaggtccacgaaaatcagaccgtctttgaccgtgatggtgttagaagcgccataagaagccggaacgaacgatgcggtgtcctgccattgcagttggcatagctgggttacggaatgctatcagcaggtcaatatgagtttctgccatgctttctgcatgtccttgaggacgctcagatcaggcttcaaataatatctggcggtggtttggatgtcggaatgcccgagctggcgtgcgaccacactgatgtcggttccggctttgatcgccaacgtgccgaacgtgtggcggaggttgcgtggcggcacgcaggggagtttcatgcgcttgcaccaactgcggtagtggtttgccacttggttcgcgttcagactgccgaccagtcgtccggctttcgtgccgtgacgtagttccgccaatcgtttgaccgcgaaccgtggcaatgcgacggttcgtcggctcagatcggtcttcggttcggtgacggtctcatggcccgccacccactgcaccgaccttttcacggtgacggtgccgcgacgcaaatccaagtcggcccattccacgccgaccgactcgcagcggcgcaatccggcgcacacggacaccaatagccacgcttccaatggatgcccgtagaagcctttcaacaggcgtcggacttccgacgctgacagtacttgcggctcatagtgtcgtaggtgcggcaggcgtatctcgcgtctggtcacgtcattgtcggccaaaccgcgtttgaacgcgaggcgcagtatcgcgcggaacaccgcgtaggccttgcgtgccgctcccggcttgtcgaaggagtccaaccatgattcgatgtccgccacgctgatcgcgtccatgtcccttccgctccattgcgggaggatatggcaattcagggcgctttcgtagcctactttggtgcattcgcggagtttcgcacatgagggtttccaaacggtggtcacgaatgtgtcgaaaagcattggttcctttccaattctgttgaataatcccacacatcgtcgtgttgccgttggatgggcgcgtgtgtgggttttcccattgttccatatccctgtttttttaggaggatattttgactcagatcaaattcgatttcggacatccaagcgccgatggcatagcggacttgggcggcgagaggattcatgtggtcccgaccgaacggttcaggaacggcagtcgtatcgtcgtacgcgactcgttcgaggtgcgtctggacgagcacggtaccgcgaccgtcaccgttccgccgaccgatgacacgttcgcatatgaggtgactgtcggagagagtgaggatacatggcgtttcgtccgatgcgtccaagtgccggactcgacttcggttttgaatttctccgatctggtcgaagtcgattcgaccacgctcacaccggtgcagaccggcaatccgttggccgacatcgaccagtccgatgtggattgggctgtgtccgcgatcaatgcctgagtttttagaggaggtttgttttggctaatcccgataagtttttgcgtctgcgtgattacgcccgtttggagcgcgcgcagaaggatggtgtcgtggacggcaccaagttcgcctacgacagtgcgaaacatgtcgtgtcgaacgtgcgcgagtatttcgacgcgcatcgtgatgggcgcacgtatggcgtgcgtttcccgctctatagcttctccaattcgccggacggcgtgaaggtcggcgacaatgccggtctgaccgtcgtgccaagctcgaattatcgtgccggacgtgatgattacgctggtttgagcgcgttccgcgtgttcgacgctaacgttgcggtggccgatgatggcacgccggtcgtgaaggccatcaagggtttggctggcaattacgcgaaggacgggtccaacggcgacgtgttcgtcatcaccgctccaggcttctatcggttcgagttcgacacgaaccattgcaccatctggtattcggacacgcagtacgacggctattcgccgatgccgggcgcgctgctgccggacgggtctctccgcccgtgcatggcgtacgcgaaatacccgctgtccaattacggcggcaaggcctcgtccgtctcgggccagattccagcctccatgagcgaacaaggctccgtggccgtacccaccagcaaaggcaagggctacagcggaaagacttccgccgacacgttctacacccagctcatgcacatgctcaaatacgcggccaagaacatcgaacgctacttgggcggcgacttcaacggttccgctcaggtcaacgtcagcaaggccgaaaccaacgtcacgcgcgcgctggtcaaggccactgacgcggcaagcatcgacctcggctcctacgtgagcgtcggcaccggcaccgaccgtggagacaacaagaccggcgaggcggcggcataccgcaaggtcatctccaagaccgtcgtggactcggcaaccaccgcgatcaacgtgtccggcgcggccttcacgaccacgacggccatgcatgtcacccagatgccgtacctgaccggttcgacggacggcgtgctcggcaacgacggcatcccccgcgaggacgtgtccaaaacccatcagccgatcaagctccagggcatcgaactgttcgccggagtctacgagaccgagggcgacatcatcctgaagaacgtgaaggattcggacacttccggccataccgaagtgtggaaggtgttcgacaccaccaaggcgagcggcaccgccatcaccgccgactacgtgcatgtgggcgactatccacccgtcaacgacaagaccgacaaccagtggcagtggcagaccgacttcaccgaaaagcacggattcctgctgcccaccggcgtcggcgcgacaagcaccagcggcctgaccgacgcgctgatcatcaacccgatctccgctccgggactgcatgagttgcagcgcggtggccgtctctgggacggctcgcactgcgggttgttcggcgcggacggcaggctcgatctgtcggtcgcttggtggtacgacggcggtcgcctatccgttcttggccgcacgcacgcctagtgcgggcggttgggggtgagcgccagcgagggggcgaaagcccccttatcaccctcgtatgactcttgataatattccagggattcgtgacggcttcgccgggttcctcctgctcttgcagcgcggtggcaatctcagggacggctcgcactgcgggttgttcagcgcgaacggcaggaacgatctgtcggtcgcttggtggaactacggcggtcgcacataagggttaaccgttttccgtcacgactaccctccgctttcggggatatgcgagagggcaagcctcggccatgccgaaaatcgaatcaagcacgcgaccggtaggccacatggccgaacgccgccaacattccccttatagctttcatgaaaacatattgcaaacacagtcgcatcaccgaaccagcgttcgtgcgcgactgcatcgaacggttcctcaaaggcaaacgctcccgcagggacgtgaacgaattcctcagccgccatcccgacttggattcgctttcacggcagatagcggacgagataggacgcggcgaatacaggttcgcgcccatccgctacttccgccgtgtggaaccgatctcaggcaagatacgcatcatcggacgcgaaagcatccgccatcagatctacgattacgtctgcggcacggcgttgatgccattgttccgcgcgaaggtcggcagatggcagacggcgagcatccccggcaggggcatagccgacgcgcgtcgcgcgatcaaacgatgggtgcgcgaaccatccagcaaagtgttcgtgaaactggacgtgcgcaaatgctatccaagcatcagccgtgaagtgttgaaacgtttgctctcgcgcgacgtgggagacaaacgattattggccttgacgttccacctcatcgaccggtacgcgggcgatgacggattgaacatcggctcctatctgagccaatggctcgccaactactatctgagctacgcctaccactattgcgaacggcatctaagcaaggagcgcgtgaaccgcaggacgggcgaaaccgccaccagacggctcgtgacgcacatgctgttctacatggacgacattctcctggtcggcagatcgaaacgtgacctgaccatcgcggtcaaacgcatacgcgcctacctgcatgacacgctccgcttggagattcacccgacatggaacgtgaagcatgtcggcatggaaccaatagacatggtgggcttcactttctggcccgaccataccggcgtcagggcgggcatcttcctgcgcgcacgacgctcattccgccgatacgcgcggaaccctacgagtcttcggctcgcataccgttgcgccagctattacggctggctcaaaaacagcgattccatccaataccggcgtcgaagcaacgtcgatcaaatcgtccgccgcgccagaaacaccgtcgcggcaagccgaaagaaaggataacagatgattcagaacgtctcttccgcaaccccgttggaaaaggtgggctaccatctccgcgatgacggactggcggacatccgcatccgccgcaacatcaggaccgtcacccatcaggcgaccgaaaatcagccggaatacgtggagtacacggcagtcgagtcctatcaggtgctcccgttgctcgaacaggaggccatcgaacaggcggatgtcctgttcgagggtgacgccaccagttccaggccggtgctcgacagggtgagcgcattggaacaggcaagcctggacaacgcgcaattgctggccgacctgatggcgggcgaggacggggatacgacggattccaccgatgccaacgacggcagcaaggacactgccgacgattccgccgacaacaaggacaaggagtgagaacaatggttagattcaatcatgccgcagcggtccgcatgtacacccgtctggtcaaggccggacgcaagacgctggacgaagtaccggaggaataccgcgcggaggtgcagcagaaccttctcgacccgtggttctgagtaagaaggcataggtgaatcaggaagcaatcaccatcatcgtcgccatcatcggttccggtggtttcggagcgctcgtcccatgggtgctcaacagaatcgacaacaggcgcgacccgctgcacgagggcgttaaggagctgctgttctgcaagctcgaactgctgcaccaacaaatggtggacaacggcggcgtatgcaccgtcgagacgaaacggaccgccgaacgcatttatcgcgcctacagcggtctgggaggcaatggcgtcggcacggaaatgcgcaacgacatcctcgacgcgcacatacaggaggacaggaattgacgcacctcatgatcgcgggcggcacctacctgctgctgctcgccttgttgctcgtcttcaatcatggcgcgcacaggcattgattttcacaccagttttcaaagccatcccacttcgggatggcttttctatttgccccttgacttgggggcgggaaggagaggatgtgggcatcctcaacaacaaaggcaagccgaagcacaagcgtctgcgtcggcatatcggcaagccgttgaccgcgttggctgcggtgttgtgcgtcgctgtcgcgccggtcgccagcgcgaacatgaacgtcatcgacgtgagtggatggcagtccgctgacgtgacgcgcgtggtggacgctgacgcggccatcgtaaagatcacggagggtggcggctacgtgaatccgtcttggcgcagccagaccgattgggcgcgtcagaccggcaaggcttgcggcggctaccattacgcggacggcggcaacgtcaccgccgaggttaaccattatctcaaccagttcaacggctatgtgggccagtgcgtgctcgcgttggactgggagtccaacgggaacgccgcttggggcaatggcgattgggtgcgccagtgggtcaaccaagtgtattcgcgtaccaaggtctggccgatcgtgtacgtgcaagacagtgccgtgtatcagattccgtccgacgtgcgcgcccattgcatgctgtggaaggctcagtacgcttccatgaacgcgactggctggcagtccactccgtggaacgccggcagcaagggcgagggcatggtgcagtatgcttccaccggctatctgaacggtgttggccctctcgaccttaacctgttcttcggggagcgtgacgcttggcagaagatcgcgaacggtgatcgtggcaaaacgaatgccgaggtgaggcatgatccggtccgaccgcaggtcactgccacgccggattacaatgacatggccacgaaggtgattcgcggcgtgtacggcaacggcaatgagcgtcgtcaggctcttggcggtgcctatgacacggtgatggcgattgtgaaccagcgtcttggcggttctggtggcgcgtccactgcggtgaactgcggcagcctgtgcgtgaccgtcaagtccggtgacacgttgagttccatcgcagctagcaatggtggttcgtggaaccagtacacgggataccgttcgggtaatccgaacgtcatctacgctggcgagaccgtctgccgtcgcaccggcgcggccagcacggccacggtcgccaccggtggacggtacgtggttcgttccggcgacacccttggcggcatcgccgcatattacagggtcaacatgtacagcatccacgggtaccgttccggcaatccggcgttgatctatccgggtgagaccctctactggtgattggagtaactatggtcgatgaagtcaaggagactaatcatgacggcgaaaagccggaagagaaaactggcgaggaaaacaagtacctcctgccggacaaggcatacaaggcattgaaatgggtcgcgttgatcgcgttacccgctttggccgtgttcgtgcatgtggtcggctccgcatggaaccttccatgcgttgaccagatcgtgaccacgttgaacgctctggccgtgctggttggcgcgttgatcggcgccagcgagttgaaggccaagtattccgagtagaaacctttcatttctctaacatcatgttggagaagtgtaagaatactatgacctactcgtacattgagtgcaagtcgcccctctcccggcattgctgggggaggggcttttctgcgttttaaggcttctattctgcggttcgattggctctatcgccatcaccaaagtctatttgttggcccatttgatcgtaatagcggttttgatacatgttgcaaaacttttctctgatgtaatccaccacagtttgcaccgccgtatgtttctcaatgtctaactgtttttcggtgatggttatcttctttgggaactcgtcttctggatgccaggtatcgtaaccggctccatttatcaccagtctgggcgcgttggacacgaacccatatcgctcgacaagtctcaacgcctcatcgaatccacgaccgtatccttccctgtatgaaacttcatcaagctcatgatgtggcattctcgtcacctttctgttcgatctgcttcaggtctaatgcggagttcattgtttccatcgcggccaaccgttccttcaatccggcatgacggtaatgctccaccatcaagcggctggaatgtccaacaatctcttccaccaagccatagtccacgcccatactcatgagtatggtcacgaccgtatggcgtgtttcatgtcggctacgatgttccgcattgggtacgcccgcgttctccaagagttgacggaagttttcaagatcttcctccggttcgatgggcgtcccatcatcatgccggaacaacaatccatatgggttcggtatgtcatcggtcgcttcgagatacgcttcgagcgtttgagccaatgccgggatgatcggcaccttcctgccgcgcttcgatttcggtggcgtgaggcaccagcgtcctgtcagttcgatcatgtcgaatccgtcagggatgcgccaacgccattgaggacatgcggctccgcgcttgtatccgcatggatagacgccatgcttgtccggattgccgcatccatgctctttcttcagttcttccagtttccagttgacagtgtattcgccgtatggcacgccgttcatttggcctagttcgaggtcttggatggatgcgccgagtatttcgcctggacgcatgccggtgcacaatctgaaccattcctttgcggcgtttctcacacctagatcgttggcggctttcaggatgcgtttagcttcgtccacggtgaatgcggtacgttcgatggcttcgttcttgcgactgtccaccaaactgatgtccttgtccttcggggttgggacgccgcccatcgggttggttgggaggatgcggtctgacaccgctgatttgcatatctggttcaatgtggtgtgtacctgcttgcggaggctgaggctggctttgacgcgctgttccttgccgttgacgaccttggttatgcgtaggccgttgacgatgcggtcgcacgctccgctggtcaggctcgccattttctgccggtggtatgggagcaggtgtttgcggacgatggtccggtagtttgcgaatgttttcgggtccgcgtcgcgttgtctgcgttcgagccattgttcggcgtatgctccgagcgtgatcgcgctgttgttggtgctgccgaatctggctcgctcctgtagtagttccgtcaatcgcttgttggcgtcaacgtattttttgcagctgtatgttttgccgtcaaccttgaactcgtagctggtgtagatttttacggttccgttggctagtctcttctggcgttcaacccgatatgggtagacgatgccgtttcttgctttgcgtaccatgattgcctccttgcctctatattctcagacattctcagacttccatttacccattacttacgggttgagtacaccttaagtacggtgaaaccgttggaatgaagccgttttgcccaatcgttccaacgggtattctatcagactttctaactgttaatcggacggtcactggttcaagcccagtcgcaggagccacatgaaagcccttggaaatcaagggctttttgttactctaacgaatcaagcacgtcgtcgatcagcgtgcgctcgtgcggtccatcggtcttgagccgaggaaagcgccgcaacgcgttggcgggacttgccccggccgcgcgcgccacattcgatttcgactcgccgtgcgccaaagccgtttccgcaagacggtccaccagcgagtccgacaccttgcggatctgctcggcaacccacaactgcgccagttcgggggagagcgcgtaatcgtcctgcaattcgcttgacgcttcctgcacggccgcccacagcaccataaaaggcttctgatagtaggtgatccgatcgtaatcggactcgctttccagttgctgcaacgctttgcgctgtgacgtgttatcgctcatacgttccatcgtatgccgagacacgcccggagcctgtggataactcatcctccgaccacagggccgtttcagctggacaagcacaacttcacactgtcatgctggcgatttaccacagcacaacgcaacggcgcaaacacagcaacgtgaaggagccatcatggacgaacgtgaatatcgcaggcgaatccgacggaacagaatcgcacaggaggaaaagaagcgcatccgccagcagttgcgccaaaccatggtcgtatgcgctctggcatgtgtcatgctgctcgtgtgctgcctatggtcggccgaaccgacgtatgcgaaaacgaatgcggcgaccgcgtccggttcctgcgccgtcctgatgcgatggccgctgaacggcgcgcaggtggtcggcaagtacgatgcgccgaaacaacagtggcttccaggccatcggggtgtcgacctgcttgcggaccctcaggaagccatcgtcgcgcccgcggacggcgtgatcgccttcagcggcaacgtgggaggcaaagccgtggtcaccatccggcatggaggcgacctttccggcctgacctcgacgttcgaacccgccattgcggaacgcgatgtcggcgcacatgttgcgcaaggggagcgtttcgcgcgtgtggagggcgaatccgaccattgcgacgagcggtgcctgcattgggggataaaatcggaaggacggcaatacaccaatccggaaagcaaaacccgtacggtgagaatcggattgaaaggcctgtgaaacaggggtcgacagaaccattgattttgtccatacgtcgtggcctcgtcgaaaaaagtgaagctctcaggctatgatgctacatgtacgacgattacgcaggggagaaatgccatgtacaaggaatacacgcggcctttggaacagcagatcgacacggataagaacattttctcggtgcttgatgaacgagcgaaccgcactccgaacgattcattggtcgaatacaagaacgagcatggcgagtggtcgtcgttcagcgccaccgaattccgtgccaaggtcatcgccatcgccaaaggcctgatcgcccaaggcatcatgcccggcgaatcggtgtccatcatctctcacacctgctggcagtggactgcgctcgacgtggccatcatgtcgatcggagcgctcaccgttcccgtatacgagacgaattctcccgcgcaggtcaaaatgatcttcaacgacgccaacgtcaaaatggcgttcgcagaagatgacgcgcaacgcgacaagatcgaatccatcagaaacgaatgctccaatcttggcgacgtctacgtcatcggacttggcgcgatcgacacgatgatcgaatacggacatgccgtgtccgacgccgaattccaagagcgcgaacatgcggtcaaaggatcggacctcgccaccatcgtgtacacctccggctccacaggcacgccaaaaggcattgagctcacccattccaatttcgtgttcatcacctattcgggcattagctccatgcccgatatcgcgatgaagccgaaccgtcgtctgctgctgttccttccactggcgcacgtgttcgcacgctacatgcagttcttctgcttcgcaggtaacgtctcgctcggcctatccagcaacttgaagacgatcctggctgatttcaaagcgttcaagccgacgttcatccttgccgtgccgcgtatcttcgaaaagatatacaatgcggcgtcgcaaaaggccggagccggcctcaaaggacgtattttcgcaggtgccacgcagacggcgcgcgactggtcgtacgcacagcagtcaggcgaaggcattccggttgtcttgaatctcaagcatgcgctgtacaacaagctggtgtactcctcgatcatggacgtgttcggcggccatgtggaatacgcggtttccggaggcgctccgcttgattcatccatcgcgcattttttcaatggcgtcggactgccgctgctggaaggctacggcatgaccgaaacctgcgctccgtcaagcgtcaatccgacctccggatacaagattggcaccatcggactgcctctgcagggcgtggccatgggtgtcgacgaggaaggtgaactgtgcatcaagagcccggccgtatgcgccggctaccacaacaatcccgacgtcaccaggcagcagattgtcgacggctggctgcataccggtgatcttggttccatcgacgacgaaggcttcgtctccatcgtcggacgtaagaaggacctcatcatcaccgccggcggcaagaacgtctctccatgcgaaatggaagcgtcgatcatgacgtcgcccgtggtgagtcaatgcgtgatgatcggcgaccgcaagccgttcatagcggccatcattgcgttggatcttggcgaaacgaacgcatggcttgcatcgaaaggcgcggaatgcgcggcatccctcgaggaggcctcccgcaatccgatcgtgcgcgccgaagtggaacgtgccgtcaacaaagccaacgagctcgcatcccgtgccgaatcgatccgtaagttcgaaatcgtgccggacgagttcaccgaagaaaacggcttggtcacgccgagcatgaaggcacgccgtcaggcggtggttgatcactaccgcatgctgatcgacaccgtcatctacgttccgaagaagtagaatgcgatgatcggcggtaggaatgtgccggccgcaacataaaaagctggcttccgtcgcggcggttcgacggaagccagctttttccatctcttgtcggatttcctatgtctgataatccggattaccttgttgccggtctacaagcctgcttcggcgagcgagatatatcccggttcgatcagcgttttcttcagattgctggcgctgaccgcaagcgcctcttcctgaatggtcggcactttcatgtcttccatggcgacggatgagatgaacgtcatcttcgcaagtttgcccgacgtgttgagctgcacgcaggtctgtgcgatgtcggatgctaaggtcttgcgattttccaaagcggtcatccactgtttgccgttcacgatattcggtatggagctgacgtaggcgccgtaaccggtgatgatcggccattgcgagttctgctcgtcaagggaatcgctggtatcctccgtatcggaatcgccgtcatcggattcaggcgcctgcgcaggatcgggaacggactgttttttcaggtctttcttgccggtgatattgtctacgatgccggaaatggtgatggatgggttgatgtcggccgccgaaccggtatatccaagatcgttgagctcttcggaagcatagccggccacataatcattgcaggagatgatgccgtcgatgcgggtatggcgcgatgtgtccttatccatgccgagacgtccggcgagcgtggatttgacccgctcacttttcgccgcgtcgaacgccacggacacccaatcggattccgcgctcgacgaggtcagcgtgccggatggggaaacggccttcccatctttgaaatacggtccaagcactgaccaaatgcctttgaacacgccttgcgcgaaagtcgcgtccgctgtgctgccgctttcattggcggcatcgtaggggagtagcacttcgatatgcttcggattgtcggagctggttttgtcgagctcgagcttgctgaccagctgtttggcttgaagctggccgatctgctcggccgtggtcatcggcacgtacacatccggagtgaaaccctgcagcgtgttcgacactaacacgactttcatgccctcgttttgagcgagctgcaatgcggaaaccaaacgttccgcggattgggcgtagtcctgggcgtcttcgtcggaggagctcccattccatgtgatggcgtgcgacacatagtctccatattggcggtcggattcggtggtgtcggccaccggcgccactaccagagtggttttgtcggaggaatccgcatcgtcgctggtgctgttgacgtgattcaccacgtaatcctgcacgctttggctttgcttgtcgagacttggcgccgctttgacggtgatgttggcgcctttgacatcattgtctttcaatgatgaaacgatttccggcaccagcttctcccatttgctcagaggcgtctgctgggagatggtgatgccgtccgaaggggtgaagatcaccacgttgccggcatcggtggcagtggcggtgctgggggagtccgtttcatgcgattgcgtttcattggcggatgagcaggcgcccatggtcatgatgagcgaggtcgatgccaacagtgcgaacagacgtttcgtcacggtcgtgcggtgcagtgtcatgccgtttccttcatgaaaatcgaatgatgattcctatgctgagctccgattgtaatatccggacgtcaaaaagggctggatatgcgtgtgaaccatacatatccagcccttttgagcctgctgctggccgttcagccaaaggttatttcgctaggtcattcggccagagccttggcgagattctcgtccaaagcgttcatgaagccttcggtgtcaagccaggcctgatccggaccaacgagcatggcgagatccttggtcatctgaccgccttcaacggtagacacgatgaccttctccaaagtttcggcgaaatacttgacttccggagtgttatccaagtcggcgcggtgcttgagaccgccggtccaagcgaaaatcgatgcgatcggattggtggaggtcttctcgcccttctgccagcggcggtagtggcgggtcacagtgccgtgtgcggcctcggcctcgacggtctggccgtcaggggtcatgagcacggaggtcatgaggccgagagagccgaagccttgcgccacggaatcggactgcacgtcgccatcatagttcttgcaggcccaaatgtagccgccatgccacttgagggagctggccaccatgtcgtcgatcagacgatgctcataagtcaggcccgctgcggcgtacttgtctttgtattcgttttcgaacacttcggcgaacgtatccttgaactggccgtcgtatgccttgagaatcgtgttcttggtggaaagatacaccggatagccgcgcatcagaccatagttaaagcaggcgcgggcgaaaccacggatggaatcgttcacgttgtactgcacctgggccacgccgccgtcggcaccatagttgtacacgacatgttcgatcggctcggaaccatcttccggagtgaaggtgacggtgagcgtgcctgcccccggaaccttgaaatcagtggccttatactggtcgccgaacgcatggcgggctactacaatcggcttggtccagccgggaaccaggcgcggaacgttgctcatcacgatcggctcgcggaaaatggttccgccgagaatattgcggatggtgccattgggggacttccacatcttcttcaggccgaattccttgacacgcgcctcatccggcgtgatggtggcgcactttacgccgacatgttcacgctggatggccttcgccgcgtcgacggtcacctgatcgtcggtggcatcgcggttttcgatgccgagatcgtaatattcgagatccacgtcgaggtatggaaggatcaggcgatccttgatatctttccagatgacgcgggtcatttcgtcgccgtcgagttcgacgaccttgccttcgaccttgattttggccatgtgttgccctcctgtcgggattgaaggtgataagttcctgtcttataacgaacgtgttaacggcacctgttaatgtccaaaaaacggtgtggcggcaggtgacacgctcttgcatactgtcattgctgagcattagccttgaaaacatgtctcaggaaattgaaatcggtttgggcaagaagggccgtctggcatactctctggacgacgtttccattgttccctcccgtcgtactcgcgatccgcaggatgtgtccacctcgtggcaggttgacgcttatgaattcgacgtgccggttatcggcgctccgatggattcggtgaccagcccggccaccgccatcgccatgggcaagatgggcgcgcttggcgtgctcgacctcgaaggcctgtggacccgctacgacgatccgcagccgctgcttgacgagatcgccgaactgccggccgaaagcgcgaccgagcgtattcagcagatctacgccgagccgatcaagccggagctcattgtcgagcgtctgcatgagattcgtgacgccggcgtcaccgttgcgggcgccctgtccccgcagcgcacgcaggactattattcgaccgtgctcgaagcgggcgtcgacctgttcgtcatccgcggcacggtcgtttccgccgagcacgtctcccaggatcacgagccattgaacctgaagaagttcatctacgatctggatgtgcccgtcatcgtaggcggcgccgccaactacaccgcggccctgcacttgatgcgtaccggcgcggccggcgtgctcgtcggcttcggcggcggcgcagtatccgcgaaccgcaacaccatcggtgttcacgctccgatggccaccgccatcgccgacgtggccgaagcccgccgcgactacatggacgagtccggcggccgttacgtccaagtgatcgccgacggcggcatgggcgactccggcagcttcatcaaggcgttcgcgcttggcgccgatgccgtgatgcttggctctccgctggcccgtgccgaggaagctccgggcaagggcatgcattggggtgccgaagcccgtcatcagacgcttccgcgcggcttccgcacgaacgtcggcaccgtcggcaccctggaagatatcatgtttggccccagccacaatgcggacggcaccaccaattacattggcgcgctccgtcgtgccatggcaaccaccggctatgtcgatctcaaaagcttccagcgttgcccggtcacggtcgctccgacccgctgaacgagctttgcggtaaagcctgaataacggttcattgatcctgtagcgtcatgctgcaggatcttttttgttatgtttccccggctaagaaagtcaggttggaatgattaagctatacatcgcaaatgaaagagcagaggtgagatgaatggcagcgcatagaagtggcgattcccgacgtttggacccgttgtccggacgattcacggattacatcgtgatcgatacggaaacaaccggattgagtgtgcgcaaaggtgccaagctcattgagatcggcgcggtcaaaatccgtaatgatgagctggttgacgaattcgaccagctcatcaacccgttcgaacacgtcccgtcaagaatcactggtttgacgggaatcgacgatggcatgctgctcggcaaaccggatgtgcgtgaagtcatggatgagtttgcacgctggtgttcggacacagccgtggtcatggcgcacaatgcgtccttcgacatgtcgttcctcgacaatgctgtacagctcgcttactcggagcgagacgcgcgctttgcgcaccatttcgtcgacactctggacctcagccgtcgactgcatccggaaaaacgaagccacaaagtttccaccctcatcgtcgactaccacatcgccgacatggaggagcaccgcgcattgtccgacgccaggcaggagtggatgctgtaccgcgccatgcgtgacgaggccgagctgctcggcatgctctgacagcctaacgtcgttcgaacacttcgatccggtattctcccacaggtgtctgttgatttatggatggattatttgttcggcttcgtgccgcagcaggcgtcatctccactggcggagaacattgcattgggtgcgaagttcagagcgaaaccgctctgttggtgggagacgttggctgaatcggatttggcgtcattcgtgatatttgccctctgtgagggctccgttccggcaacgaacgaggcgatatctcctggaacgcctgcgctacgtaactgacgcacggtgactggaatcgtgccgatgctgctttccgaggtgaacgcgaccactccggcagggaagaacgctttgaagaagtggattggattcaacttcgtcagtgttaagcagcaggaagaatacggttttcgcaccaatactctttaagcgcatggactctccaaggttcgtgatgctggagatgatgctgaacagcagcagcggaaccaccagtgcggtaattgcgttggaccagatggaacccaccgcgccgacataatcagtgtggccgttgaaagcgattcccaaaatgataccgaatgccgttgcaagcaacacgcgtgtggtgaaacccgcgtttttcttacgtttgagaaacgccaggatgacgaacaggatcgcggctacgccgagggcgatccaatcatatgcgatgcctgacattactatcattcccttcccaaaaaatggtgatacattacgtgagatacccccacgttcatgtcggacatcaatctatccgctccgtctccggcgcaacgccttgtagttattgctgttttccatagtcgtctatcagacggtagtcattccgaggcacgcatgctgacattccagcgctccacaagtcattccgagacgtggttgttttgcgtttagggagggctcgttttaagatggaacgtcggataactggcttcgtgtctggatttgtgagagccggaggaattggagattagacatggcattaagtgccgcgattattcttgcggcgggtgagggcacccgcatgcgttccaacaagccgaaagtgctgcacactttggccggaaagacgtttttgaaccgtgtgatggactccgtgtcggcgctcgaccctgaaacgttggccgtggtcgtgcactaccaggcggaacgagtcgccgaagcggcccgctcctacaatgagcgtgtcaccatcgtcaatcaggacgacattcccggcaccgggcgagccgtgcagtgcgccatgacgcagttgaaggagcaaggcggtcttgacggctcggtgctgatcgcagcttcggatatgccgctgctcgacgccgacacgttgaaccagctgcttgccttccatgagcaaagcggcaacggagccaccgtgctcaccaccattcttgacgatcctactggctatggtcgcatcatccgcgacagcaaaggcaacgtgctgcgcatcgtggaacagaaggacgccaacagcagcgaactggccgtgcatgaagtgaacacgtccgtctacgtgttcgatgccaaactgctggctgaagcgatcgccaacctcaaatccaacaacgcccaaggcgagttctacctgaccgacgcactcgaaaccgccaaagccaacggtgccgtcggtgcgttcgccgcccccgacccgttgagcgtcgaaggtgtcaacgaccgcgtgcagctcgcagcgctcgccaaagctcacaacaagcgtatctgcgagcattggatgcgtaagggcgtgaccattctcgactctgaaaccacgtggatcgaagatgacgtgcgtatcgaacgcgatgcggtgatccttcccggatgcttcctggaaggccagactgtgatcggcgagggcgcgcaggtcggcccatacacaacacttatcagcgcggtcatcgatgccgacgcccatgtggagcgttcccgcgtgcaggaaacccacatcggtcgcgcggccaacatcggtccgtggacgtacctgcgtccgggcaacgatcttggcgaggagtccaaggccggcgcctttgtggaaatgaagaaggcgcacatcggcaacggcaccaaggtgccgcatctgagctatgttggcgacgccgacttgggtgagcacaccaatatcggcggcggtaccatcaccgccaactatgatggcgtgcacaagcaccacaccaccatcggatcgaacgtgcacgtcggtgccggcaacctgttcgtggcccctgtcgaagtcggcagcggcgtcactaccggagccggttccgtggtacgccacgacgttccggacgattccatggtctattccgaaaacacacaacatgtagtagagggctggaagcccgaatgggagcgctgaatatgccggcagtacaagattccatcgacgccatccgcatcgccgccgccgcggccgaccgtatgaaggccaccgaccttgttgccttcgacgtcaccgaaccattggccattaccgacgcgatgctcgtcgccaccgcttcgaacgaacgtcaggtgttggcggttgccgaagagatcgaaaaggacctgtatctcaaaagcggcaagcgtcaaccgcgttcccgcgaaggcttgaccgaaggccagtgggtgctgctcgactatggtgatttcgtgatccacgtcatgcatcaggagtcccgcgacttctatcgcctcgaacgcttgtggaaggattgcccgagcatcgacctgcagctcgaacatccggagacttccgacgaagagaccgcggaaatcgcggaataacacgtatgaacatgccttcccgtatagatgcggaaggcatgttttcatatcaagcgaagcagttttcgcaaacattccataatcgagaaagcaacggagagcagcagcatgcctcgaaacgtcgaacttgagcataacagcgcagtaccggaacacgtgcacgccatcacgctggtgcgtcacggacgtaccgcctacaatgcgcagcatcgtctgcaaggccagatcgacattcccctcgacgaagtcggacaatggcaggttcgccagacggccgacgcattgcgtgaactgtatgttgatcgtcgtcccgatattccgaaccggctggtcatctgttccgatctggggcgtgccgcagccaccgcgcatgcgttcgccgacccgctgggcttggaagtgcatcccgacatccgcgtgcgtgaacgcagcttcggcgattgggaaggcattccggttgaggaactcgcgcaacggtacccggaagactatcgttcctgggctgaattccgtggcggcgaactcaaatacggtgccgaacccaaggaggaagtcggacgtcgtggcgtcgaagcgttgaacgattgggcgttccgtgccggatccgacacggacttgtacgtgttctcgcatggtgcatggatttctcaaacgttgcagacgctgctgggaatggcggatgcgcatggcgatttcgccgacattttgtcgatgcgcaacgctcactgggtgcggctcattccattggagatcggttccacattgcgttggcgtttgatggactacaatcacggtcccgctatcgccgattccgaggaatgggagcatcccagcctgtagccagcctgtagccggccgatacatgatgtcggacgctggtctgtcaccgctttttcaagcttttcacagaatcgccagtactttcatagcgaaattagctatcgtcatggcttgtgaaaaacttttttaagggaatctctttttcgtcgatttgcgcgggtgcgctggcggcggtcacgtcattcctactttccgcgaaaatcggtatcgcgggatcggtgattggtgtggccgcgggttcggttgtttccgcggttgccacgcaggtctacaagaacgttttgaaggcatcaggggagaagatccaacaggccgtgccgttcccgtcgagtagcgagacggtttcgaatgagcgagctgcggatgaaacgcaggtgcttggctcttccgaacaggatgatgagacgaggattattggatcgtctcctgttgcgtcggatgtcacgatggtattgtctgccgatacggctgcggtagcgcagtccggtttaccgcgcgtcatttcctccggacaggaatatgcggatgcgactcgtgcgctcggcgatattgccggggcaggggagacttccgttttcccgaacggacagcgtggcgtcagcgatgttggcgtagttaccggtaagaccggaacactcggaagcgcgcatgatgcccgagtacagcatgctgggcagcgttcctcgaattggttgcatagcaagtacgctccggcgatcatcgcattcgtcagtgctttggttggtgtgggagtgagcgcgggattgattcttgctttcaccggcggtcaggggacggacaccgtggtgcgtgacgtggtgcatgagaaggttgtaccttcgcatggaaataccgatgactatcagactggcgacgggcagacccccgtgcaaaagcctaagtccgattccacggattcgaacgacgaaaccaccacggacggcagcgacaaaaccaccaacggatccaccgactcgtccacttccaacggcacatcgagcaataccaatggatccacgtccggaaacagcgggtcgtcatccgataattccagcaatggttccagccagaacggaacggattcgtccaacggcactggctcaaacggaggcacgtccggcaccactggtgatggctcatcatccggatccggaaacagcggaaccgatggttcgactggcactggcacgtcgggatccaccgacggtactaccggctcgacgggagatgcaagtagtaactaatgtcgctggtggcgcacttcccatgtcgcccgcataaggttcacataaggtgattgcgtagtgcggttttactcatgccaattcctcagtgcgggcgacacgccgaaatttgcgtgacttatgtctgcgatgtatattatacagagtttgcagggcagactttggggctatggcgcagctggtagcgcatctccatggcatggagagggtcaggggttcgaatccccttagctccacgattatcgagggccactccgtaaggggtggccctttttgttgaaacgacgctgtttcgcggacgtgcttgccgaacctcaaaaacggttcaaggtgatagaaaccggttataaggtggtaaagaaacaggacttccacgacgacgcggagaaccttcggcaagatcgtatacaagccgaacagacggacgcatgaacgacccgtgtcggcaggggtgtcggcgacggacggtagagccgacatgggcttattgttaattttcattcatagatgctttgtcttgtcttatgagtgcttctaatttataatcctcataaaatataaatgactttttgaaagcagtgaccgttatgagcatggaatacaggactttggcgcggctgttccacgccgacaggagcatggactcctacgccaaccacgaccggctcgtcagacaacgcctcgaagcggactccacattcacaaccggaatcggcacacccttgggcgaactgttcatcgccacgccgcgctgcgtgtgcatgctcacacagaaggtgctcctcgccgaacgccgggtatcggccatgtggcggagcatcccaggagtcatgcggtggaactacatctaccacgccatatccgaggaattgctcgccaccaacgagatggagggggtcaggtcgacgcggaaggagacggaagccgccgtggccgcagcccggcaggccaggaccgagggcgacatggagaaggccaggttcggcgagttcgcgaaactgtatctcaacctcaccaatcgcgacgttgaactgcccaagactctcgaggacatcagggacatctacgacaagatagccctcgacgagatcgacgacaagaacagacccgacggggagctgttcaggaaaggcgatgtcgaggtccaaggaccgcacggcaccgtcatccacagcggcgtcagcagcgaggcgcggatatcagcgctgctcgcacagatgatggacctcgcccggtcggataccataccgttcctgcagcgggcgatagccagccacttcctgttcgaatacatccacccgttctacgacggcaacggcaggacaggcaggtatctgctcgcgctctacctcagcaacgatctcactctgcccaccgtgctgtccctctccaggacgatcgcggagaacaagaacgaatactacaaggcgttcactgaggccgaggacaaactcaacagcggggaactcacgttcttcgtatacaccatcctcggactcatcgaacgggcgcaggaatccctgatcgaggagctcggcgtcaaaatcgaccagctcgacaaggcgaccgtcctgcgtgacgagctacggagggaacatgcactgtccacgaacgcgaccctgcttctctacgcagtcatgcaggaggagctgttcgacaccaccaagtccatgacgctcgaagatgcaggcggcgacctcatgctgacgaaacagacgatccgcaaatacgtggatgagctggcgggcgcgagcctcatcgagttcacaggaagacgccctctcagattcagggcctccggggcgttgcgtacgcgcatacaagcaaagcgagaatgggggatggaataaaatgcctttgtgctttctctggcagatactgtctgacatatctaagccagcaaacaagaattgccacatcgcaaaaagcccaggctaaatcggaaatgtctgaatctgcataaattcttttgagggaaaaacccatcaatggaataaaggaattcacacacaatatctaaaccaagtgcggatatcggcatgctgcaggctttgtctttgaacccattgcgaatcaactcgacgtgcatatcgtccagcagataccgctgatgccaacccaaaatcaatcctttcttttccatgattgattggatagcggatgatcgtggtctgatgcctcagcaaagtgcgaaacaggtgttatctctcctaaattcggtttcagatggagcgcgtatgtgatgttattcacgttgggcgaacatgcgttgtggggtttcttgtcgtagtctgaaagtatgcccgcattccatgggcatatagacgaaaggacggcatcatggtagatctcaccgatgagatgaagggattcctcaacagcaacctcgcatgggtggccaccatcagcaaagaaggccaggtcgatctcggtccgaagatgagcatgttcatcatcgacaacaaccatatcggctaccacgagcgcaccgcgggccagacataccgtaacctgcttgacggcagtgatctggtcgtcgcggtcgccaacctcgaacagaagaagggataccgtttccgcggcaacgtcgtgctgcattccgatgacgccatctatgacgaacaggtcaaagtcgccgaagaacgcggcacgaaaaagccgatgaccattccggttttggagatcacggaaattcaggatctcactccgggcgctacggcaggcaaaaccatcgtcaaggactgatcggttccatactgaaccagtcgaaacgacaatatcggagaaccgcagacgggactgtatgtccggtctgcggttcgctgttatcggaacggaagatcgcgaatctgcagcatatcgttcgcggcggttcgaccatggattcctatacggcagttgcatgtatgggttgtggataagtgtggataagtgttcgctcatccacttatccacagattttcttaaagaggtggcgggcgaatattggtttctgccatgctggtctgcacgcataagcgaagacgcctatgcgacaaccaacaaccaaagaaggtgaaccatgacacaacacaccatacgccgccgatggacctccatgcttgcgctgggcatgatcgcggctcttgccatgccgggcacggcccaagccacgccgcaactcggcgatttaggcgtcaagcagtccatgagcgtgaaggcaagcaacggggaaagcctcgaaggcaaggacctccgcgccatccagcttgccacatataccgccgcaagcgtggacggcaacacgatcgtcggctacgatctgaccacgaacacggcattggcatccgacatcaccgcggcagccaaagcggccggagccaccgatacgaaccttaccgtcaacggcaaaaacgatccgatggtgtgggtggtgaagaacctgaccgactcgcgcagcgatccatggagcggaaagctacgcaacttctgcaacagcctcgccaaacaaaccaacttcgccaagcaggatggaacggcggtttccacactcagccaagacaaagccaccatgtcgaccggcaacgtactcgtaccgggaatctacgccatcgtggaccgtacaccggcgacaaccacactaagcagcggcaccgccatcaaaacaaccgcgtccatcatgatgatgaacggcaccgcggtcaacggcgtcaaccaactacgtacggccggcggcacgaccctgaccctcgggcaagtgatctacaaggtatccaacgtggaatcgccagacaaaaaagtcaacgtcggcagtgcctggaaagacagcgcatccgaagcgataggcaaggacctgacctaccgtgtgacgcagaaaatccccaactggacaggctacgagcactactatcttgcgttgaacgatacgcttggcgcgggtctcgactatggttcgctcacctcgatcaccgtcggcggcaaagcattggcgagcacgttctacaaggaaaacgtcaacggcaaaaccatcagctggctgttcggcgtcaacggagacattctcgcctcggacgcatcaaaggcggccctgccggtcggcgcgacgatcacagtcacctacaaggccagactcaacagcaatgcggtcatcggaagcccctgcaacgtcaactccatcgacttggaatactcccacaatcccaacgcatggcaggaccacaacaaccagcccggcaacgaggttaaagtctgcaccggtgaaatcgcattacgcaaggtcgacgccaaaagccaaaagctcaccggcgcgaaattcgccatcgcccaaggcgccagcgacaaaacgcctttgaaactcgtggccctcggcaacggcacctaccgcctcgccaccagcggcgataccaccacaaccaccacattcgaagccggcgaaaccaaaatccaaggactcaaaggcgaatacaccatcaccgaaacacaagcgccccaggactactcgtcgctcatgctgcccagcgcagtcgtcaccgtcaacgttgacgacaccaacatgacgtggagcctcgacgtcaaatccgaccccaacaacctcatcaaaaaaggcgacagccacaccgtggtcgtcaccaacatccgtaccatcaccgaaataccgttgactggtgcggcaggcctcaccatgctcttcagcatcgcggcactcctcttcataggaggcatcgtcatgctgcgcatgtgccgatcaagcaacgactagccaacatccgacaataggcaacacatggcgattcccccgcatagcaaaccacggcacaaaaaagcgcccaacaaacgcagcatcatccgatggtgcgtgggaaccgccatgctcaccgcaacggcactcatcatcagcatccccctgatcatgcgcgccgaagacaacatccaacaagcagccaacgtcaaagcgtacgcagccaccatcaccaacaccgcaaacaaggcaatccaagaaagcaaacggcaggcgaaactctacaacgcgcgcctcgcaaaccaaaccagcaaccaaacagacgacgaacccgcaacgcaaaatcccgacgaatacaatcggcaactcgtcatcccacccagcgacgtcatggcaaccatcaactacccgaaactcggcatcagcctacccatacgtcacggaacaagcgaacagacgctcgccatcggcgcagggcattgggaaggcacatccctgccaatcgggggagcgggaacccataccgtcatcaccgcacaccggggcctcgccgacaaactcatgttcaccaaactcgaccaagcccgagaaggtgacgaattcaccatcaccaccctcggcgaaaccctcacctatcaagtgcaaacaatccgcaccatcacccccgacgatttcacctggataaacaaacacgacgccagcgccgatcaggccacccttatgacctgcaccccatacggcatcaacacccaccggcttctcatcacaggaacgcgcgtccccaaccacgacgaatgcccgccagaaacaggatgcctcaccgacggaaccctctccaccacggcattcgcgctcacagccatctgggcgaccctcaccacactcgcacggcatagctacaatgaaatgcatgatcgacgaagtactcttcctgcgccacggacgcaccgcatacaatctcgcaagacgactgcaaggccaaatcgacattcccctcgacatcgtcggcaggtggcaggccgaccaaagcgcttatgaactcgccaaaacatactattgggcgaaagtcgcgcacatcgccgaccataatgatgaactcgcccaacccgcgtacgagggcgcgtatctcgccgatcttaacgaaatcaacgaggcaccggccgcgagccgacgcatggtcgtcgtatcatccgaccttttccgcgcccaacagaccgctcacgccatcgccgaccttctcggacttgacgtagccctcgacccacgcctgcgcgaacgcagcttcggcgaatgggaaggcatgacccgcgaggaaatcctcgaacagtacgccgacgactaccattcatggcgtgcccacaccggaggcgaaaccaagcatggcgtcgaaagccgcaggcataccggccagcgtggctcccaagccatacgaagcattatcgccgaacatgccgatgatccgacggccaccacgctgctcgcagtcggccatggatcgtggatcgtggccaccgtcgccgtgctgctcgacatggatccggacgacctcaacaatctcggagccatgcgcaacgccttctggacgagcatgagcgtcaacacaggcggttccaacggtcctgcggatcccgacacatggcagtggaagctcgacgccttcaaccaaggtcccgccatcgccgcgcttaccgattgggagaatgggccgaaggaattgcgaggccccaacatgccattgtggaagcccatcgtgcagtgatccgcagtaaccgcaacgatctgcagtgactgtcgcctgccgcggacgcatgcgtcgaacatgaattctcgatgaaatctcaggcacgcggccggccaactctcaaggtgggactatcctaaataaggttgtttgcccgaatgttccagatcgatcgcaagagaccgatcgccggagatgttggattcgggctgccgtacagcgatagaacgtcggaaagcgcgaaaggcgggtgagagacatgttgagaatgttcagaacgattaacggccaggtggagcagatccaaaaacccgaaaacggatcttggttatgcctttcggatccgacggatgtggaactcgccaacgtttccatggaaaccggcgttgatctcgccgacctgcgcgccccgcttgatgacgaagaacgctcccgcgtggacgtggaagacgattacacgatgatcatcgtcgacattccaaccgtcgaagagcgcggcgggcgagactggtacgagaccatcccgttgtcgatcatcatcacgcagtcggccatcatcaccgtctgcatgcaggacactccggtgttgcacccgttcatggaaggtacgatccgcggtttcaacacgtatatgaaaacgcgtttcatcctgcagatcctgtaccgcaacgccaccatgtatctgcggtatctgcgtatcatcgaccgcgaaagcgacaagctcgaactcaaactgcgccattccatgcagaatcgtgagattctcatgctgctcgaactgagcaaaacgttggtctacttcaccacgtcgctcaaatcgaacgaaatcgtgatggaaaagctgaccacgctgccgcgcatcaagcagtatccggaagacgaggatctgctcgacgacgtcatcaccgaaaacaagcaggcaatcgagatggccaacatctacagcggcgttcttgccaacatgaccgacgcgttcgcgtcgatcgtgtcgaacaatctgaacaacgtgatgcgcatcttcacgatcatctccatcacgctgtcgattccgacattgatcttctcaatgtacggcatgaacttccaggagggcatgctaggcatgccgttgacggacaagccgtggggcttcgccgtgatcatcggaatctcgctggtcgtttcggccattgtcacctggttcctgacgcgttcgcgcatgttcaagtagaatcgcgtagaatcgcgcgtatgctacgtctgtcacgtctgtcacgaaatatcgcggcgctggtatgcgccgcttcgaccgtattgggcacgagcgcgtgcggcacttccatttccgtagtgaccaatggtctcgcgcaggggccgaccattgcgattggcgtggccgcggaccagcctggtttgggttttctgcatgggggagagtattcgggtttcgatatttccgtggcgcaatatgtggcgaacacgctgggattcgcgaaaaaacagatcgtgttcaaacaggtgctgccgtcgacgcgcgtttcgtcacttgaagacggcaccgtggacatggtggtcgatgctttcgccgctgatgacgttcaggatggtgaggttgagcttgcaggaccgtatctgactgtgcatgcggcattgttggtacgttccgacagtgcgggaaccatcaccggaaccgatgatcttgccggaaggacggtatgcgtggccaaaggaggaataccctcctacagcgtgcgaaatcttgcggaagatgtgaccgtgagcgaacgcgacacgtatccgcaatgcgaaacggcattgatgatcgggcaggcggacgccatcgcggcagatgacgccatagcggcgggcctcgcatccaacaggggaggcggatatctcaaggtcgtaggcgaaacgttcggcgaacgttcgtacgcgatcgcggtcaaatccggccaatccacgctggccaaacagatcgacgccgcattgcagtccatgatggacgacggctcgtggaagcaggccatagacaagatgaaacagtcgatcggctacgttcccgacatgtcgctcaaccctcccgcgataacgctctcggcagcgtcggaaggctgacggcccccgccttgcgtgacgctttgcaaaacgcttcttgcataatgattgacgccttgcgaagtgtccagttgcgcggctagtttcatgcattatgagtgacattgagaaaagcgcgcagacgcagtcgaacgaaccagccgaaccgtcgttccgttacaacgcggatttggctcagggcattgaggaaaaatggcagaagatttgggatgacgaaggcaccttctgggccgccaacgtcaatggcgatctgaaggacggcaagggtcgcaacgccgaaggacgcccgtcgtacttcgccatggatatgttcccgtacccgtcgggcaagggcctgcatgtgggccatccgctcggctacctcgccaccgatgtggtcagccgctaccaccgcatgaagggcgagaacgtgttgcacgccatgggctacgacgccttcggtctgccggctgagcaatatgcagtccagaccggccagcatccgcgcatcaccaccgagcagaacatcgccaacatgcgccgccagctgcatcgtatgggcctgagcttcgacaaccgccgctccttcgccactattgacccgggctatgtgcgttggacccagtggatcttctcccgcatctacgattcctggtacgacgaggatgccaccaacccgtctggctccaagggctgcgcacgcccgatcagcacgctggtggagcagttcgaatccggcgagcgtgagattccgggattcgcaggcaagcagtggaatgatctgaccgaagccgagcaggccgacgtgctcaacgacttccgcctggcatacatctccaagtctccggtgaactggtgcccgggcctgggcacggtgctcgccaacgaggaggtcaccgccgaaggcaagtccgaacgcggtaacttcccggtgttccagcgtgagctgcgccagtggtccatgcgcatcaccgcatacggccaccgtctgatcgaagatcttgacggcatcgactggccggaaaaggtcaagctcatgcagcgcaactggatcggcgaatcccacggcgcttccgtgcatttcgacgtcgaaaccccgaacggcgtcaaggacatggagatctacaccacccgtcccgataccctgttcggcaccacgttcgccgtggtctccccggagcatcatctgctcgaggatgttcccgccgaatggccgtccgagactccggaagactggaagggcggctacgccactccggtcgaggctgtgaaggcctaccgtatggccgcggaatccaagaccgccaaggaccgtgtggacgaggcgggcgagaagaccggcctgttcaccggcctgtacgccatcaacccgatcaccggagccaagctgccgctgttcaccgcagactatgtgcttatggattacggcaccggcgccatcatggccgtgccgggtggcgaccagcgtgattacgatttcgcggtcaagttcggtctgccggtcacctacaccgtgcagccgctgccggaatccggcgacgatctggccaactatgagggcaaggctccgttcgtctcccacgacggcatcgtcatcaactccgctgtggacgccacccgtgccaagggcgacgcgttgagcctcaatggactgcgcgtggacgaagccatcgacaaggtgaacgcatggctggaagaagctggtgtcggcaagggcacggtcagctaccgtctgcgcgactggctgttcagccgccagcgttactggggcgagccgttcccgatcgtctacggcgaagatggcaccccgcatctgttgccggacgaccagctgccgatcaacctgccggacgtgccggactacagcccgaagactttcgatccggaagacgccgaatccaatcctgaagcgccgctgagccgcaacgaggattgggtgaaggtcgaactcgacttgggcgacggcaagaagacctactaccgcgacaccaacaccatgccgaactgggccggatcctgctggtactacatgcgctacctcgacccgaccgacaccgaacacatggtggagaagagcgagttcgactactggatgggcccgaaccacaacgagaccactggcaagtccggcggcgtggacctgtacatcggtggcgtggagcacgccgtgctgcacttgctgtactcccgcttctggcacaaggtgctcttcgacctcggcttcgtggattccgcggaaccgttccacaagctgttcaaccagggcatgatccaggcatacgcctacaccgacgaccgtggccagtacgtgccggccgccgaagtggtggaaggcccggccgacgccaacggagagccgaccttcacctggaacggagagcacgccaaccgcgagtttggcaagatgggcaagagcctgaagaacatcatcacgccggacgacatgtatgcgaactacggcgcggacaccttccgcctgtatgagatgggcatgggcccgctggccgaatcccgtccgtggaacacgcgcaacgtggtcggatccatgcgcttcctgcagcgcctgtggcgcaacgtcgtcgacgagaacaccggcgaagtgcgcgtcaccgatggtaagctcgacacgaagacgctgaagctgctgaacaacacgatcgccgacgtgaccgtggaaatggaagcgatgcgtcctaacacggccatcgccaagctcatcgtgctcaacaaccatctgaccagcctcaacgaagtgccgcgcgcggccgtcgaaccgttgattctgatgctttccccgatcgctccgcacatctgcgaggaactgtggaacaagctcggacacggcgaatcgttggcccacgccgaatggccgaaggccgacgaacgctatgtcggccaggacgccgtcaccgcggtcgtgcagatcaagggcaaggtgcgcgccaagctcgaggtctcgcccgacatcgatcctaaggaacttgagaagatggcgttggaagccgtcgccgatcgtctgggcggcaaggaaccgcgcaaggtcatcgtcaaggctccgaagatcgtgtccatcgttcctgcggaatgatatttcgaaaaacggatccaacggcttctggcgagacctttgacgaggcttccaacagggtgggaaccgtttccgcataaggcgacacgccgaacatgtggataactcccatccttcgaccacaggggccgtttcgactggacaacatgcccatgcatcctccactttggatgcatgggcattatcgttaccccgccgggcaggcgcaacaggcaagccgaaaccgcatcgcagtccgcgcaacggctgcgcggacttggcatgcccgaaacacgtggaaagaacgcgcgcgggcagaacgttcgcaacgaacatgctgttcccgcgatatccgaaacaacctcaatatccgagatttccgcagcggctgaaacgtccactgcaatcgcgacaactgaacaatcgcctgaacccgcaaaacccacattgcgggatctggccggcgtcaagccttccgacaaaccgactgaacaggaccggcccaaacgcgaccgtccacgactcgtcttccaaccaatccacgcggtcatcgccatactcaccctgtcgtgcgcgctctgcgcaagcctgaccatgctcatccaacaggccgtccactacagtgcgctccaacaatcgcagatcacccaatccgaacaatcgaaggcgaacggaaccgagaaagacaagacggcgtccacgcaaacaacaccaagccagcagccatccacggaacccgacagccagagcgaaccaacatccggaccagcggagcccgccgatccggctgacggtctgctgaacatcaacaccgcaggatccgacgaactgcagaccttgaaaggcgtcggtcccgtgaccgcgcaacgcatcatcgactatcgcaatcagatcggccgtttcgacaatgtcgaccaactgttggaagtcaaaggcatcggcgagaaaacgctggcgaaattccgagaccaagtgtgcgcacgatgagaggaaacacgttcgaatggcgggatggggagcaggggagcagggattggcgtctgctgccggccgccctatgcgggtgggcggcgagcttggccacgcatatgggattcgactattgcgtcgaacgggatggtcggttcggcatgctgccgctcgttgtggcattggcggtaccgttgctggcattattgggattattgggattgccgttcctgcgatcgcctatgctgcgagtgccggttggcgtgcggcgggcggtctcggcatggcatttcagcattatcgtatgcgtggtcgcggcgatggcatgcgcgtcttccgcgttgacctacgacgtattgcaatggagggatgtggcctcgtacgcggccagaaacggcgaaagcgacgttgtcacgctggtacgtacgacatctcccgcagtgaattcgaacagacgtgcaaacgattgccagattgatgcgacgatctcaacgatcacggcaagccaggtcacgcagccaagcatgatgcgggtgcgcgtctatgcggaccggccggactgtggcacgctcaaacaaggcggcgaataccggatgcggggcacgctcgccatatcgcaatacggtgccatgccgctatggctgacggacatcgcctccgtggaacgcatacggggaccgaacctcgcattgcgcacgatcggcatgatgcagcaggcgttcttcgaacagacgtcacggctttccgaccaagggaaagtgctcgttcccggcctgaccttaggtattcttgggcaggattacgttcctccagatagtggcaatggccagacgggcacgggtattgatttcacatacgccaatctgcttgaaaatgccttccaacgttcgggcatactgcatctgatggcggtcagcggcgggcatcttgcggtcgtcgccaccctggtgcgcgccgtctgctcgttcctgctgctgcccaaacgcgtcacggccatcgccatcggcgcgtcgtacatcatgctggcgatgtgcgtgttcccatccgattcggtgtcgcgcgccctgctcatgggtttggcgggagcgggcttcctgttcctcggccgaagaacgcaagccctgtcaaccctcagctggaccacgttgggcatgctcatggtcaatccgcacatgtcacgcagtttcggattcgcattgtcatgcgccgccgtacttggcatcgtactgttcgcaggaccgttaggcgcatggctcacaccgatcatgccggcattcatcgcgcaaaccatggccatgaccatcgccgcgcaactcttcaccctgccgatccaagtgcttatcgaaccagaactgccggtctactccattccagccaatctggtcgtcgcacccttcgtgggattctctacacttgccggactcgccagtctcgccatctcatggatactgccaagcctcgggttcatattcgccagcctcgcctcatggggcaccgccatcatggaattcatggccctcaacctcggatcaggagaccacgccaccattccatggaccggagacgcaggcggcgcgctactgatcatcctcgtcgaaatcatcggatacacgaccgcacgattcgccggaacactcttcgcccgcatcaccacaacggaaccaaacctgccgggccgacgcctcatacacaatccgatcgaacgggcgaaagcatggggcgaacgaacctacaacgcgctcaaaaccatgaaatggaacgaatgaatcttgtccaccgatacagcgagattgaatactatgccgaaaccatccgcaacaacgcccttccacctcatctacggaggcgacccgtacctcaacgagcagaccgtacgcgacctgcgccaccaagcgcaacgcaaacaccccgacgcggaaaccatcgaactcgacgcaaccaacgccgatcattacgccttcgacgaagcggtaagcccatcactgctctccgaacgatcaatcgtcatcgtatccaacctgcaaaacgccgacgacaaactcggcgaaaccatggtcgcctactgcaagcaagccgtcaacaatccagccgaagccagcgtcgtcatctgccaacacgaaggcggcatcaaaggcaaacgactcatcgaccaactcaccaaagccggagccgtcaaagaaaccgtagccgacctcaaaaaagccgaagcgaaactcaacttcaccatacaatgcttcgaacgacgcaaccgacgcatcgaacccatggccgcacaacaactcgtggccgtactcggcgacaaaaccggcgaactcgcagccatggcaggacaactctgcttcgacttcgacgacaatcccataacattggaacgcgtcaaccaatacctcacagcaaatccccaagtagacggcttccgtgtcgccgacctcgcactctccggacgtgccgccgacgccatcatcgccatgcgagcctcaatagaacaaggcaccgcgccaatcgcactcatcggagcgctcgccatgaaactacgcaccatggccaaagcctcagccgtacgctccggcaccatcagcgaagcggaagcgaaaaccaattcatgggtgctgaaaaacgccaccagacagctctccggatggacctccgacggcatgagacgatgcatccaaatgctcgcatgggccgacgaacaaagcaaaactaacggatcggaccctgtctacgcgctagaacgatccatcgaactgatcagcagcaaaggacgaaccaactaacatgagcgaggcaaccattactgacgccaacgaaaacaccagcgaaggcactgccaaaaccgtcaccgtcgaagcgacaaccggcgaagccatgcgcgaactcggcaaacaagtcgcacacctcacccacggcggagacgtcatactcctctcagggccactcggcgcaggaaaaaccaccttcgcacaaggcttcggcgcaggactcaacatcagcgaacccatcgtctcgccaaccttcaccatcgcacgcgaactcaaaggccaattccccagcggtaactccgcccacctcatacacgtcgacgcctaccgactcggcggcaacgcctatgccccaggccaaaatgccatcgaacgactactcgatgaactcgaatccctcggactcgacgaagaactcgaagaccccagcgacaacaccatcatcctcatggaatggggagaacagatggcagccgcgctcgcaccggaacgcctcgaaatccacatcgaccggccactcaacaccgttagcacagacgaaacaagcagagccgacaacgaactcaccagcaacggcacccgcactgtaaccttcattcccgtcggcgcatcctggcaaaccttcgacatcacacgcaacaaccgctaaaacaccagcagcaagcacgattccagcatcggttgtacagtagttcccagcttggcataaggagtttccacaaaatgcagacactggtgatcgacacctcatacggctcaaccgtcggcatggtcggacacgaccccatcgtcgaaaccgactcacgcacccacgtcgaaaaactacaggtgaacatcgccacaaccgtggaacaagccggcctcaaaccggaaaacatcgaccgcatcatcgtaggcatcggacctgcacccttcaccggactacgcgcaggaatcgttgcagccaaagcgctcgccttcgccaccggtgcacagcttatcgggcagaatgtgctttccccgcaggtgcttgtgcgcaacgcggagcatgacggccgccatcatctgacgctcgccgtgaacgatgcgcgacgcaagcagctgtatttcacattgttggatggcagcggctatgaggccggtggcagcgcaggcgaagaccatgacgcaaacgttgaaaacggctgtgtggaaaccctgatcgacatggatatcgactatcccgaatcgattgcgaaccgtgtcaacgaggtgctggaacggcttcgccaggccgatccgaacgtggaatatgtggtcgacgtcgtcggccatggagcggcgaaatacgcgcaatcgtgggcaagccttcccgaaggcggcgaagtgcgcgatcaggcgctgctcgacgagggcgcgtccggattggaacgattcgcggccttcgccacttcgcaacagtctttggtgaatccggagccggtcgaaccgttgtatttgcgcaggccggacgtgtcggtgccgaacccgttgaagcatgtactcaaccatgccggcgcggaacgcacggagtgacgatacggcatgatcgttgaccatacaagcatcgatgaacagatcgcagtgccgcagatggccgctttggaagcggacctgttcggcaggggagcgtggagcgaacagtcgattcgccaggaattccaagcgccagcacgcacgtatctgttcgatattgatgatgacggcaagaccgcggattgcgggattgcgggttgcgttgccgtggatgagccggttgctggatcggttgcaggcgattctgctagacaacagcccgttgtgcgcggctatgccggtttctggtatgacggcgacgatgcggaaatcatgacgatcggcgtcggcagacggttccaacggcagggaatcgcggcttcgttgatggaggcgttgattgcgcgggcacgtgagcagggggccaaacgcatgttgcttgaagtgcgcgtcgacaatactccggccttggcattgtacgaacggttcggttttgccaaaatgggattgcgcaaacgctactaccagcccgaaggcatcgacgcgtacaccatgagccttgaccttgagccgaggatcgtcggcttcgcagcagcggaacaataaacagaacaaccaaacggaacagcaagcaaagcagcgaacggagcagcaatgagcggaccaatcgtactcggcatcgaatccacctgcgacgagaccgcggcctcggtagtgcaggggcgcaccctgatttccaacgtcgtcgcatcctccatggatgagcacgcgcgttacgggggtgtgattccagaaattgcgtcacgcgcccacgccgaagcgttcgtgccatgcgtttccaaggcgttggccgatgcgaacatgacgttgtctgacgtcgacgcgatcgccgtgtccgcaggtcctggacttgctggctgcctcgccgttggcgtgtccggcgcgaaatcgcttgcctgggcggcgaataagccgatttacggcatcaaccatgtgatcgggcatattgcggtcacacagttgcagttcggcccgttccccgaagacacgctcgccttgatcgtgtccggcggacacacgtccttgctgcatgttgaggatgtcgcacgtcatatcgacgtggtcggcaccacgcttgatgatgcggccggcgaatgcttcgacaaggtcgctcgcctgctcggtttcccctatccgggcggaccgcatatcgatcgtcatgcgcagttgggcgacccgcatgccatcaaagtgccgcagggactcacccaaggcaaagcgggccagcagcatccgtacgatttcagcttttccggcgtgaaaacggccgtcgcgcgttggatcgaggaacagcaggcgcaaggcaatgagattcccgtcgatgacgtgtgcgcgtcgctggcggattccgtggcgactgtactcgccaagaaggcgatgcgcggctgcgagcagtacgattcgaagacgttgattgtaggaggtggcttctccgcgaattcgcagcttcgtgccaaactgttggaagtcggtgccgagcatggggtagaggtgcgtgtaccgcagctcaaactgtgcaccgacaacggtgccatggtggccatgctgggcgtcaacctggtcgaagcgggagtggctccgtcaaacccggatttcgccatcgattcggccatgccgttgacgaagatctccatgtaagattaggccgaaagcatcgtatggaaacgttttgcaagtcgaaacacacatgtgacacgctgaagatttgaaatccacaagttttggtgtagtatttttgtcttgtgcacagcgcattcctgcgtagctcagttggcagagcatccgactgttaatcggacggtcactggttcaagcccagtcgcaggagccatttgaaagcccttggaaatcaagggcttttgtcatattcatcgtcatattcgaggaatcaacgaagatgccgaggttctggcttataggaacttttggccaataacccggatattgcggcaggcacgttttacacgaaattcatgattgaggagaacgatactatggatgaggtagccaaagcagattcttccacgggcaaaacttaagattttcccagcaagcggcgtttaccatgaacacgcaagcaagaaaaccacggcaaatcatggaagggagtccatatgtgcactggtgttcgtttctccgacaatgagggaaacatgtatttcggccgtaatctcgactggagcttctcctacggcgagaccattctggtcactccgcgaggctaccggtatgactatgcgtatggggccaaaggcaagagcgagccgaatgcggtgatcggcgtgggcgtggttatggccgatcgccccatgtatttcgattgcgccaacgagcacggcttggccatcgccggattgaacttccccggatacgcctccttcgcgcacgaaccggtcgagggaaccgaaaacgtcgccactttcgaattcccgctgtgggtggcacgcaatttcgacagtgtcgacgaagtcgaagaggcgttgaaggacgtgacgctcgtttcgcaggtcgtgcccggccagcaggagtccttgctgcactggttcattggcgatggcacccgtagcatcgtcatcgagcagatggctgatggcatgcatgttcatcatgacgatgtggatgtgctcaccaatcaaccgaccttcgacttccatatggaaaacctgcgcaactacatgtgcgtgagcaacgaaatggcggagccgaccacttggggcaaggcggaactgagcgcatggggcgccggcgtgagcatgcacggcattcccggtgacgtgagttcgccgtcgcgtttcgtacgtgtcgcctacaccaacacgcactatccacagcagaacaacgagtccgccaatgtgtctcgtctgttccacacgctggcctccgtacagatggttgaaggcatgtccaagatgggcaacggccagttcgagcgcacgctgttcaccagcggttattccggaaagactaacacgtattacatgaacacgtatgaggatccggcgatccgctcgtttgccatgtccgacttcgacatggattcgagcgagctgatcaccgccgattgattccggaatttcgagttcgaagattccgcagtaatcgcactatgtgcgatggcataaaaggacgcaacgtcgcagtcggcgttgcgtccttttaatcagtaaaactgatgagatttgattaaaattaaaatggtcgaggcatgcttccaaacgtactttcaggcgttttcttcgttatgttccttatgcgaggaagcgaatcgcgacagaacacctgacttacgtaaagcgcaatacattccccaggaaccgaaaccggcgaatgccaccgcgctaagcagctcgcaaatagtgccgatgatgcctcgcgggctgaagaacgtgaatgcctgatagtagaagaacagcaggtagaagttgtagacgattccaatcgccaaagcagacagaatggtgacgccgagcgtccaacgacggtagcggaacagtgcgaataccgcttctgcggctgccgcctgcagcaatgcgattaccaccaggctcacactgtatttcgtgccgagtaccacctcgacgaacgatgcgaccaaaagcacgtaggccgaagctcccggcttgcgcacgatcagagagcccagcgtggcggggaagtagaacaaagcatgaagtagcgccgctgaaccaggaagaatcaaagtcatcaacggaaaaagaccatacgacaggccgtcgaacacccaaaacatcactcccgacatcacgccgaccgccgcgccgaccgcgatatcgaccacacgccatgtgagggccttgtgtattccttggtttgttttcaaaggctgccttacctgcttcgacagcttcgcgtctgtattatgaataacggttttagagaatggcttcgccataatgataatgaatccttgcgttggtcgatgccgtgcaccgtgagtcggagatcgcggcagtcgccgtgggccgttcctcgacctgcgcggctcgggcaggaacgacgaaaggtattatacgacgtgttgtttgccgaatacgcatcatggatttccctgtatccaaaatatcgttacaaatattccaaatccgcatcatggatttccctgtacccaaaatatcgttacaaatattccaaatccgggcgtacggtccagtccagtacatctaatccgcacgatttcgttcaactcagcagcataagagctttttgttgtgaggtggcattcgtccaaaacagcgtggtctgatgttccttacgatgaacacgtaagttacgctttgcagacgcaacttagctaattgtcaggattacatgttcttttgctatgagatagcatgcaacacgccaattagacttcaagcactttaagtttttacagtgcagggtatgagcactacaacatggcatacgattcgtgaagcatccatgatttccggacttcccgaatccactttgcgctactacgagcaaatcggtatcattgccccgatcgcacgtgacccaagttctggccatcgcgcctacaccgacgaagacattcaatcgttggtcactatttcctgcttgtctgcgactggcatgccgcttgacgccatgcgcgagtatctgaaaaaccgtttcgacggaaccgaaggtgcgcgcaggcaaatggcgctactggacgcgcaggcgttgcgtttggccgcaaaagccgaaagcatccgcatgcagcaagcctatgtttcccttaaaacattgtattggcgtgccgtggcggaaggccatgacgacgaagcgcaacgacttctggaggaaaaccacgatgtcatcgaaacagtgaaaaaacagattcgtagcaaggctgacgcataagtcgaggcgtcatcgcagacgttaccttaattcaattcgtataacaaaggagcaactcatgaaggcagcgatcttcaagggagtcaagcagatggcatgcgaagagcatgccgaaccgaccatcatcgatgggggagatgccatcatccgcgtggtacgcgcatgcgtgtgcggatccgacctgtggttctaccgcgacggcagcaaggaacccaacactcaggccggacatgaggccatcggcgtggtcgagcagatcggcgacgacgtgaccgtggccaagccgggcgatttcgtgatcgtaccgttcccgttcagctgcggcaagtgcccggtatgcaaggccggtttcgaatccagctgcccccacggcggatatttcggagacgagggattgggctgtcaggcggaatacctgcgcgttcccgaggccgatggcacgctggtggtcgttccgggcgacgcgaagagcttctccgacgaaatgctcgcatcgctgctcaccctctctgacgtgatgtcgaccggttaccatgcggctgcttccgccgaaatcaagccgggagacaccgcagtcgtgttcggcgacggtgcggtcggcctgtgcggagtgctgtccgccaagctgatgggcgccacccgcatcatttccatgagccgccatgccgaccgccaacgtatcgcacgcgaattcggtgccaccgatttcgtggaggaacgtggcgacgaggctgtagccaaggtactggaaatgactgatggttacggtgccgacgccgtgcttgaatgcgtagggtccgcattgtcgaacgacactgccatgaaggttgcgcgtgcgggcgctgtagtcgggcgcgttggcttgccgcacggcgtggaagccgatattccaggactgttctaccgcaacgttggtctgcgcggcggtccggcaccggtgcgcacgtacgatctgcagcgactgctcaaggaagtgctcgacggcaacatcaatcccggcatcgtctacacctccgaatacacgctcgacgatattcaggaagcgtacgcggccatggacgagcgccgcaccgtaaagtcgctgctgcgcatcagtgaggtctgagcaatataccgacgatagaataagcgcaaatcaaacgaaaggaagcaaatcttgtttgaagagctgcacaaacggatgaattcgttctggaataatgacaggacattgtcgcaaaccgatccggaattcattgaattcttctcgaatttcgcttatgacgaagtggtgaacgaaccgggagcgaaccatcctgatttggatgacaaaacccgctctttggccattcttgccgtgctggtcggatgccaaggcttggatgctttcgaaatgatgctgccggtggcctacgaaaccggactgtcgtccatcgccatcaaggaaatggtgtatcaggcgaccgcatactgtggtttcggcaaaaccctgccgttcctgaagaaactcaacaactttctcggcgcggccaacgtgcatcttccgcttgaaccgcaaggcaccaccacgccggaaacgcgtgccagggcgggcgaagacaagcagatcgaaatcttcggtgaaggaatgcgtggattcacgcaatccggccccgaagatacgcgacacatcaacaagtggcttgcctgcaactgcttcggcgactactacacgcgcggtggcttgagcacgcgtgagcgtgaaatgatcacgttgtgcttccttgccgcgcagggcggttgcgagccgcagctgacgtctcatgcgaaggccaatatgggcgtaggcaatgagaaggcatttctgattgccgttatttcgcagtgcatgccgtatatcgggtatccgcgtacgctgaatgcgattcgttgcatcaacgatgcagcggagcagatgcaaggctgattgcggtaggatttcgttcgcttcagtacgaaaggggctgtttgccagtcacgattggattgcaaacagccccttatatgttttttacaagcgcgctacgcgtgtgcgatcatcactcgccccatacgtccttggcgacggactgcacgagcgcgatcttggcccactgctgctcttcggtaagcttgttgccttcctcggtggacgcgaaaccgcactgggtggacaggcacaagcggtcaagcggcacatactgggccgcttcggcaatgcgagccttgatcacttccggatcctcaagttccggcttcttggaagtgatcagaccgagcacaaccttcttatctccggaaaccttggcgagcggctcgaagtcgccggaacgatcatcgtcgaactccaggtagtaggcggcgacgttttccttgccgaaaagcacgtcggccacagtggcgtatccgccggcggaagcccacgtggagtggtaattgccacggcagtcgtgcgtggtgatcaccagatcctctggcagatcctcgatggcggcgttgttcatggcggcatactgttcctgcatggcggcgaactcatcggcggtgtaatgctggttgaagttcggatcacagaacatgccccacgtgcagtcatccagctgaacattgcggcagccggcctcatacaatgccatgatcagaccatggaaggccttggcgttgtcgtcggcaagctcgtcgtaatccttctgggtgtcgccgtagaactcgtgcacggaagcgatgttctccgggcggaacagctccgcatacagctgtgccggagccggaatggtctggcgtgcaatggcggtgtcgtcttcgaactgcttgatgaacttgaaatgctcaacgaacgggtgggccgggtcgaaggcgatcttgctggtcaggcgtgcggattcggcgcgggtctcctcatcgtggaagaaatagcccttgtccatcgacaccttttccacgccggcgaagccccacatgcagtcgagatgccaccagccacggcggaattcaccgtcggtgatgacgtgcagaccggcggccttctgcttggcgaccagttcggtaatggcattatcttccacggccttgagttcggcctcgtcaatcttgcctgctgcgaaatcggcgcgagcctgcttgagttctgccggacgcaggtatgagccgaccacgtcggcgcggaacggcgcgttctgggaatacgtcattggatgctccttgttgtgctgtcagtgaaaatacctagggaagactagtcaatccttcagaaaaatgcacgattacgtcgggaatatgagacgggcgcattatagtgttttgcgattgaacgacatatgattcggggggggggtgatatgagtgatgggaccgggcggcaggcaatggcagcgcaaagtggtacgtcggataatccgaaatcctccaatcaggaatcatcgaaaaagccgaaaacgctcggcaaatatctgttggtgtcggcaacgcaaaccattgtggaattcggatcgttcaccttgctgcatgtgctttccgtaccatccgccatcgcgaacggcgtggccatcgtgctgtcggcttcgtacaacttcctgatgaaccgcaatgtcacgttcaaatcgtccagcaatttcggccgtagcgtggctttgttcatgctgctgtgggtttggaattacctgttcggttcgatcatgctggcatggctgccttccgcattcggatggaatgcggtgttggtgaagttcctgactatggcatgtcagttcgcgtggggctatccgctgtgcaaggaagtgatttttcgctgaacctgcaagcgtgtcaatccgggtggcaccctatgacagcaccctatgtatgattgaatatgtcttgtattaactccagaaagaaatggaaaggcaatgaacgaatcgcaagattccaacgacagtagtacgagcaatccgaacgatattcgccaacaggaggcagaacatcaaggagcggccgtaaaagcggcgctcggagccaacattggtgtggccatcgccaagctcgctgcggcgttctttaccggatcgtccgcgatgctttccgaatcggtgcattccatcgccgactgttccaacgaaatcgtgctcatggcaggcggtcgcttctccaagcataagacggacggcgatcatccgttcggtctgtaccgcgccaaatatctcgcttcgttcgtagtggcgacgctgctgtttttcgtcggtggtttcttctccacttcggaggcggtgaagaaattgttcgccattgccgaagaccccgcactgcgtgacgccaaccagatggaactgctggtggcgtttatcgtggtgtttatcagcgcttgtttggaaggctacggcctgcatcaaagcatcaaggaagcgaacgagcgtatggagcgcacgggtgtggcccatatgggtgtgttccgtttttggaggcgtaccaagtcggcggagcttgcgtccgtcattatggaagacacgcttgctttgatcggcttggcattcgcaggggctggcatcggtcttgcgattctgtttgataatgagatatttgatgcattcggcggtttgatggttggtcttgtattgattgcgggatcgttgctgctcatgttcaaatccggttcgctgttgattggtgaggccgtcgattcggatacgcgcaagaagattgagcaggctgttatttcaacgcctggtgtggaacgactgctgaatatgcagaccgtgcatatgtccgaggatgacattctgctgtgcgtcaaggtgcagaccagcaagctcgaccgcgattacgatgttgaaaccgtgaacaaaatcgaacgaagcgtgcgtaccgcgctgccgtggttccgtttcgaaatctacgtagagcccgacctctaccgcgccgaccacaaaatcgtctcgtagtggtgtgcggtgtacctatggttatgagacgtagagtatgaggcgacgatacggttttcaggaggagctggcattccgatgagttcggagtgccagctcctccttttcatgtgctttcttgttatgcgtctccttgagcccatacatatgcatcctttccaacatccgagctttagcctcatcaacctcggcgcgagtaatgccgctatccagtatgaactgctcaatgctatagctcattacatttcctttcgtatgattcctctaatctaatggattacccccatatctaatagatcgtaaaacccgttttcttgaagcaaaggcgtctaggtggaggtatgtctcggatgcgattggtttgtttatctcgagatgtgagacacacttacccccccctaaagtggtagggtgggtggtgcattcggggacgcatgcgcccctgtcataacgttccgggagacaggatggagaaaatggagaatatggagaatccgaagaaactggccgttgcgaccatcgcaggcttgaccgaggtggccggtatggccgcgcccgccatggcagatgagacggccgccgatccgatggtgggccagacccagtcggccgatccgacgaaggatgcgctcgacaaggccaacacggccgtatccgaatcccagaccgcttatgataatgcccagcagaatgtgcaggacgctcaatccaaggtggatgatgcgtatgcttccgacccggccacgaatgcggcgcagtccgaactggatgccgcccagtcggctaagaaggatgccgaccagtcggcggctgacgcgcaggccgatgtggatgccgcccaggctgctctggctgaagtgaacgccacgctgaagacagccgaaaccgcattggccacggcgaagtccgacgcggaatccgcgcaggacgcgtacgacaaggcccacaaggttgtcaccccgtcgaaggatacgaccatcacggttgatactccggacagtgcgaacagtgcgaacagtgcgaacagggcggccgtgaagacctccacgcaggccaagcttggcgacacgggcgtggacgtgatggagaccgccgtgtttaccattatggccgccggtaccgccggagccacgctcatgctgaagcgtcgtggtgacggccgttacggtcttatggcacgccacgccaagtaggtttttgccataaaatcctagaaaatgatgtgcggatgggaacgaacgattcccatccgctttttcctaaaacgtatgtgacataactcatcgaaagcacaagtatgcagggaaaactatctgaagtttccaacccgaatataagcgatgccgggtcaaagaatgtaactgaaaacaagaagaagagcagaaagcctgctgtgatcgccgtggcttcggtcgcggccgtggctgtgctggctggtggcggctggttcgtttggaagacctacgcgaaccatgagctggccgaggcgagacaggcgtgtgtggaagcgtcggaaagctaccgcaaggcggcggactcgtattccgggctggtggatggcgacgcggccacagcctcccagatcaccgtgaagcaggtggcggatgcgaagaccgtggatgcgttggccgaagcgttgaaggcgaacgagcctgacgtggtcgcctgcgtggccgattcgaaggcggattacgagtcgaagaccagcctgattgaaaagaacaccggctggtacgggaaacacgagaagagcttggaagaagcggtgaaggccgtgaacgattcgaaactggagaagaccgtttccgatgcggaacggttgttgaagaattcggacggcaaggtcgccgatgcggcgacgcgcgacgaactgtccaaggcagtcaaggccagggatgcggacaagatcgcggccgcgtcgaagaaggtcaacgactcggtgacggcgaaggcgaaggcggacgaggaggcgcagcgcaaggccgaggaggaggccgccgcacaggccgccgcacaggcccagacgcagcagtcgtattcggcgccgcaacagtcgtacacgccctcgtattcaggcggttcgacatcgagtggcggcggttccagcagcgtgccggacttcgttccaagcagcggaggtctcggatgcacgacagactgccctccgtcctcaagcgatggattgattcaccactgatttagatgactcttcttctcaagggacccttcggggtccctttttcgtatccgcagccttccgggaaaatgtccaacccgacacgcccgaaaccgtggttgcatagcaggtggatgacggaaacgaatccgatatcgacgtttgtcgacggccgggcatgtgaagtgttcggacgggatttgttctcctgtccgaccccaccgggagtggggtgaacatctgcagatgaatctctgaaaggagacggaacattgggttccaagaacagtaacggaaggcgaaagacgctggccctgctcgccgccacggcgacattggccggaggcctgaccgccggcaccgcctgggcgggcggcggcggagaccagggaggcaccggcggaggcggctcggccgcgcagttctgggcctacaaggacgacgcgacgggctcgtggggttccgcgacggacctgaacagcgtgagccgcgccatggcctggaaaggcgtgaccatggacgattcggccggcaaggccgccaaggcgttgagcgacgcgaacgcggaatgcgtggccggcttccgccagaggcatccgggcgagggcgacggcgattgccgcgtcgtggccgtgggcgcggcgtccggcaacgggtccaccaccagcgtgtggaacgggtccggcgtctacgacgcgaagatatggaaggacaactggtacaagtacgtcgcaccgaacacttacaactacgctggatctcagtcttatcacaccggcgatggcttcagcgatgatccgtcgaacagcgtcgacaagatcatggaacgccatgtcgactcgacccgcagcatcgtcgtgatcgtgctcgacaaataccagcccgccccgccgaactacacgctgagcgtggccacgaaggcatccggcacgaccaccaaggccggcgacacgcagaacgtggcggacacggtcaccaccagccgtaacggcagctcgatcagtgagaacgtgaccggcaccagcacgctccgctgggccggcgtggacggcaccacccacaacacatggaacggtgataccgaagtcaccgccgaaggctactactacgcatccgaggacgaaaccatcctccagcccgtcgcacgcaaagacggcgaaaccgtcgaccagatcaccagcacgctgaggtgactgtgaacgtcccgaatcttccagctactggaagattcttcccgctgacgagcacatgagcgcaccaaattctccagtgggtggaggaatctgcccattaacggttacgatcgcatggtcggcacatgcgagaagaatcagtggcatgactgaagccgcacatgatgattatcagttgcccgaagaattcgaacactgtttgaaacttgcccctgtacgcgatgcgcctagcgcgttggaccgtgtcaagcaggtcgtacgcattctgcacgaaccaggcggatgcccttgggacggcgagcagaccaacacgagtctgcttaagccgctattggaagaaacctacgaatacatcgacgccgtggaaacgaacgatcgcgacaacatgcgtgaagaactcggcgacatgctgctgcaatccgttttccaagcgcaagtgtgtgccgtggatgcgcaggatccgttcggcatcgacgaagtgtgcaatcgtctcgtcgacaagctcatcacccgacatccgcacgtcttccaatcagacgacgctaccgacgcttccgcgccagcaccggaaaatgcgcaagatacgttgaaactgtgggaagcgatgaaacagaaggaaaagcatcgcaagtccatgctcgaaggcatctcccacgcgcaaggcgcattgccgcgcgccacgaaaatcgtatcgagagtacacaaatcgcagtattgcgatcagcttgaaacagcattcacaacaagcgcaagtcaaatggacgaacagcatgatggcgatcatccttacgctgacgaaatcatcgccatcatccgcaaagcgcaacgtgacggcgtagacgtggaatccgacctgcgttgccgcctgcgcgacatagaatccgaaatcgaacatatcgaaaggaccatgaaccatgagtgacgtcaaagcactcgaccctgcgctgctcaaacagtattccacagacttcaacgctgaccgcgccaatctggtggcagccaacgcggcagtatcatccggtgtgctcgccgcagccaccgactataagggcgagcgcgtgctgcagaatgatttctccatcgagctgaagcaggggagtatcaccaatcagcgtagttcggggcgttgttggatgtttgcggcgcttaatacgttgcgttatgagttgatgcatcgttggaatttggaggatttcgagttttcggaaacctacctgtttttctgggatgcgatggagaagtcgaacacgtatttggagaatgtgcttgccacgttggatgagccgctggatagtcgtgtgttcgaggcgattaattatggtccggccgatgatggtggttggtggcagatgttcgctgatttggtgaacaagtatggtttggtgccgaagagtgcttatccggagtcggctaattcgaagagttcggatgcgttcaagcagtatttgaatacgaagctacgtgagttcgcgtccgatttgcgtgaccgtcatacagctggaacgtcgttggatgagttgcgtgcgttgaagaatgcggatatggctacggtgtatcgcatgtgtgcgattgcattgggtgagcctccggagcgttttgattttcttgcgcgtacgagcgatgacaaggatgacggcaagaagaaaaccacgggggaggggccgtctgaaaaggctgcgaaaaccggtaaggatgagcgtccgcagattcgtgaattcggtatcactccgatggagttttataagaagtacgtgccggtggatgtgaacgatctggtcacgctatgcaatgtgccgatggagagtcgtccgtttggcaagcggtatcgtattcgtttttccgccaatgtggcggaagcgggtgatatggagtttgtgaacgtgcctcttgacgtgttcaagaaggctgctgtggaccagatcagtgacggtcatccgatttggttcgcttgtgattgcatgcagttctcgttgcgtggcgatggctattttgattgcgataccgtgcgcgttgaccagcttttcggtacgaaattcacgttcgacaaggccaagggattggagtatggcgattgcccaagcaatcatgccatgacgttgactggcgtgaatttggatgctgacgggcgtccgaaccgttggaaggtggagaacagttggggcaaggataatggtcaggatggctattatgtggcgtccgatgcttggttcgaccgttatgttaccgaactgatcattcgcaaggagtatctcgatgagaccacacgcgaaatactggccgatcagccggtcgagcttgaaccttgggagccgctcaccaagcgaagccggtgaaggcttgcgcatatcgcgcatgattcggtttgattgcaataaggaatgagataaacagtggagggcgtcgattgacagattcggcgccctccacttattgcagtatttagtcattatttaattgctattcggcagtaccaaggcatgcttcgaaggaacggcgggtgaggcgtccacggttgacgacgcccacgagcttgccttgttcaaccaccggcactttcttgtactgctgatagccgaacatctggcagacttgcgcgatattggcatccgattgcacagtgacggccggctttgcggcaataaccatgacgttcatatcaagcagttctgcgtgagacagttccgggaattcgccgcgggccatgccagtgaccagcgtggaaatgtcggaaaccggcgcgttgtcttgtgcgaagcggcgcagtacgtcgctatcggagatgaagccgaccacgtggcgttcgtcatcgacgataggcatgccgctgatgttcttttccaacatcatgcgcactgcgtcacgtacctcggcatccgaggctaccgtgtaaacgtcatgctgcatcacatcggcaacggtcttgacatccaaagcgggaacatgctgttgcgcggacttgttccatccggcggcatcgccgatggcgtgaactatcttgccggacaatggtgcgacgatcagcatctgaatcggcaacgcgatggtgaaattgtaggggaacatgcgccagaatcccgtgaacgcgccgaatgtgaaaccgaatgccatgatggcgccgaatacggtcatcagcaccaccatgaggaatttgaccgtgatgcctttccataccgcacggtcggttgccgcgcagaatgtattcataatcgcgcgggagcttggcgtgcagatgcacaaatcgcaaatcatgccgaccacgtaggccaacggccagtcgaacaatgcgtagctccacgccgccgcaccgacgtcaccgatacgtacgccgtaattgagtgccgccatcacataaatcatgatcgcggacatgatgaaactgaagagaatgccctccttgccgttacgtggcatggaacttcctttcgctatgcgttcgatgtgttgctgcatcggcccctctggtctgttccgcacgtcatgttccaacaggagcgcggaaggctagggggcgcataacgaaatccgaaaaggttcggacgatcgcaatggcgacttcctggcaaacgaatcgactcaagccctcaatgggcatgcaagatgcgattcatgagtcggggccgcttgcaaatcacagattgttcgcagaccccaagacaaatacggaaataccgaacgtgctcgaaacgcatgtggaaagaaaaagccggacgttttcgcgtccggcataaatacaatccgaataaaactcgaattactcggcttactcttcggcgaccaattccagataggaatcgttccacaggtcttcgtcgccgtcaggcatgagcagcacacgttcagggttcaatgcctgcaccgcaccctcatcgtgggtgacgagcacaatggcaccctcatacttggcgatggccttgagaatctcatcgcgtgaggccggatcaagattgttggtcggttcgtcaagcagcagcacgttcgcacggctcgtcaccaatgtcgccaacgccaagcgggtcttttcgccaccggaaagcacgcgagccggcttcaacgcatcatccccggaaaacaggaacgagccgagaatcgaacgcgcctgcgtatcattcagttccggagccacatgaatgaggttttccaacactgtggcattcaggtcaagcgtgtcatgttcctgcgcgaaatagccgattttacagccgtgaccgtagtccacggaaccggtgtccggctcttccaaatgcgcgagcagacgcagggtggtggtcttaccagcaccgttgtatcccaaaatcaccacacgcgagcccttgtcaatagccagattcacgccggcgaatacaatgttcgaaccatacgctttcgacacatccttcgccatgatcggcgtgcgaccgcacggagccggctccgggaaccggatatccgccactttctcctgcttttgcgcttcggacgtgttctcgagaagtttctccgcacgacgcatcatgttctgcgcggccacggccttggtcgccttcgcatgcaggcggataccctgctgcatgaggcgttccgccttcttctcggccacttcacgttcgcgacggcgacgttcctcatcaaccacgcgctgatgcaggtaggctttccaaccaagggaatacatgtcgatctgtccgagctgcgcatccagatgccataccttgttcaccacttcgtccaacagttcggtggagtgggagatgaccaggaatccaccctcgtatttcttcaggtatccgcgtaaccattcgatggagtcggcgtccaaatggttggtcggctcgtcaaggattagcgtatccgcgtcagagaacaggatgcgggccaattcgatacgacgacgctggccgccggaaagcgtacccaattgctggcccatgacctcctgcggcaggccaaggcttgccgccatcgcagttgcctcggactgtgccgcatagccgccggccttttcgaaatcctgcatggccttgtcgtaacggttcatcgctcgggtcatgacgtccggatccggatcggtcatctccttttcggccttgcggatacgactgatgatggaagcgatgtctcgcgcgctcatcatgcggtcgagcgcggtctgttccggatcggcagcatgcgtgtcctgcggcagatagccgagcttgcccgatacacgcactttgccggcggtgggcagcatgtcgccggtgatcacgcgggtgagcgtggtcttgccggcgccgttacgtccgaccagaccgatcttgtcgcccttggcgacgtggaaattcgtgggatgcagcaacgtgcgcgcgccgatctgaatctcaagctcctgcgcttcaattgccatgcctcaacacctctgcactttcgttactgtcgttccaaactggctgtgccgcacataacggcctgcccatcatttcataaggccaaacgccaatcgaacatcataccgaacgcctgtaaccacgtgaatcccaccgcgtggtacgcaatcgcaaatggaatagattgcgcggaagcgtaacaatcagattattctggtgagcaggcaaattcggaagggagcaaacatgaagaaagctttgatcattgtggatgtgcagccgacattttgcgaaggcggcgaactgggtgtagccggtggcaatgccgtcgcggaacgtatcgcggattacgtgaatgcgcatcgcggcgagtacgaatacatcgcaaccacgcaggattggcatatcgagcccggctcacactggtcggagcaacccgactatgtggatacgtggcccgtgcacggcaaggccggcactcccggcgccgaacttcatccagcgatcgccgcgctgcatgtagagcatcatttcaagaagggacagtattcgccgtcatattcggggttcgaaggatacgaggataatacggattcgattccttcccgcgaacaggtcgcctctgacatggctacagggcgtacgcttgccgttgcattggaatccgcgggtatcgaatgcgtcgacgtggttggcttggccgaatcgcactgtgtcaaggaaaccgcgctggacgcccgtaagcttggacttgaagtgcatgtcatcgaaaacctgaccgaaccggtcagtgaagaactcggcatcgcagcccgccagcaaatgctctccgccggcgtcatcctcgactagtttcttgaggaatgggacaacgaatggagaagggattgttcagcaggcgtgtttatgaggtggtgcggcgcattccgaagggtaaagtcgccacctatgggcaggttgcggctttggccggagcgccacgcaacgcgcgttttgtcggctatgccctgcattcgaatcctgagccgggtgtgattccatgtcatcgtgtggtgttccgagacggctcgttggcacccggattcgcgttcggcggtccggaaagacagcggcttctgctcgaagaggaaggcgttgtcttcatctctccgaaaggtatgcccgaactaagcgagtcaggcaagatgaaagactcgaacgccggagcttccggactgcgagtcgatctcgcccgttgtcagtgggacgcctagtcgctttcaatccgtgtcaaccgcttacgcccccaacgacatttgctttatccgccgtggttggataatgggtgcctgccataaggcgaagaaagcaacggggacgcaaaggtggaacggcaaggcatgtggcaacaggacgcaccaggggcgatatcggtcggaatgccggttgtatcgttggcaccggctccgcgaaccatggcataacatcggcttaagtcgttggaaaatagcgcgacacgccgcgatttgcggagttggcatgcttcatgtatattttctactcgttgcccaccacggtggaaacaacttgcggacatagcttagttggtaaagcgcaaccttgccaaggttgagaccgcgggttcgagtcccgttgtccgctccattcgaaagcttccggaaggaagcttttttcatatccgaccgcaaatccgggcgtcatcctcaattcatcccgaccgaaatccgaactggaatcctcctctgttgagaaaacgtttgaccacaatgtgaacgttctcttgaaaagagataatccatgcgagaggctaggagaagttccgccaaaacaggcaacgatgccgggggagagcggaacggacggaggtaaaacaaatgaacgagaacagcgacattattttcgtgccggacgattccgccagccacgagtggacggaacgggacagcgaactcgtagaggagtatgcggcccagcttatgagcatgagcatctagccggaaattagatggggccgggttccctcttccatgacaggaaaagacgtcgcattcgtactgtaactgcggcgtcttttccttgttttcgtttagaatggagacttgccgccaaggcatcgaacacatggaaaggcgtattgttggctgagatcagacgggagatggaacggcttcgacccgtatacgaaaccggtgtcctacggttgctgctgcgtaacaattccatgctgtacgtcgcgttgttgcgttccacgttcgacccgctgacgggggagctgccgcgcgaaatcgtcgaagaacggttcgcgcgcagtctcaaccggctcatcgaaaccggcgattacacgctgaaagacgggcagactgcgcgcgaggccgcgcattcggtcctgcttgacctcgcccgcgaaggggaaggcgactacgcctggctcgccaattccatggacgtggcctcgcaccgctacctgtaccgtctcacagcgcgagcgcaccgtgccatcgaagcgctcgaccggcttgaggacaccacgaaagcgctgtccggcgcgcaggccaacagcatcatcatggaaatcgagcatgctcgcatgcagttgaccgccgatccgcgcgaacgcatccgcctgctgaagagggacattgaggaacggcagaaggaaatcgacgagctggaacatagcgaggccttggaaaagctcacgtccgaacaggtcggcgacatcatcggcgtgattcacaacactctgcgaggagtgcccatcgacctgcgcgagctcgccctttccgaacgggacaacggcgacgcgctccgacggcgcatgcaggccggcgccatgagcgtggaaagcatcctcaccgcataccatgacgaataccgacgtgcgttccgcgaatccgacagcggacgtcgtttcgaagacgcgttccaagtcatcgtcaccgacgaaggccggcgcgagatcgacgacgcggtgcgggacatcgccagaaacccctatttggatggcgagccgagcgtgctgctcaaccaggtgcgttccgaactcaaacgcatctatgaaggcatcgaggacgtgcgccggcagatccgcacgtccgacgaggcggtcagccgtctcgtacgccagcagaccgacacgagctaccggaccatgctcgccaaactcaaccagctgttcgcaaagaccagcgccgaagccaaagcccatcccaatgaccaaagccggccctaccatacggacgccgggcaggcgaaattcccgacattgccatctcgtccggccagatcaatggcgcgcgccgcatcatccagcctgaacgacgccccagcggcgaccatcgaagcgccggacctcaagaacatggtcgaaatatgcgggccgcggctgacgcacatgatcaggcttatccgcagcaatccggtgacgacatcggacggcatgttcgtggacctcgcggcaagcttcaaccagctgccgaaagccgaacggagggaaagcgaactggtcggcttccttagcgccctgcgcacgcaggacgactcgtcatacgtgacatggcgctgcatatcgatcgacggcagcgaacgcgtatggcgcaccaaacccattctcatcaccgaaacgacgctcgacgacatcatcgaggagagataagcatgacggactatatcgaagccaacatcgaggaaacgatcctgacagaaggggagccggtattggaagaggccggcagccagcaggcctcgaccgcgctgttcaacggcgacaccggcgacatgcccgtcgaagcgcgcatggccgcgatcgcgctcaaacgcgaacgctacatcgacggcagcctgtatgacctcgcctgcgagaaccgtgaggtcgtggaacgttcgctcaacaacgacatgctcagactggtcgacaacacgaaataccgcatcatgtacgcgtcgccggtcaccgactcggagacatgcatccgttcgttgaaaacacgtatgagcctcacccgcgaggaggccgccacgcttgccgcgctacgcatcaaagcgttggaatacgaaaaccagaacgccgaaccatgcgactggcttatcagcttcgacgacatccgcgcattgctcgccaccggcgcgggattcctcaccgccagcaacgacgaggaaggcactgcgaagaaaatcacgtccatcatctcacgcatgcgcacctacgggtatctcgcgccgatcgaagacgacgacatgtacgtcctcacgccactggtgcccatggtgctcgaccgcggcctcgccgaccagtggctcggatccgaaaccacggacgagaacgcattcgccgacggccgcaccaacgccggcccggacgacaggcccatggaagacatagaacaagacgcattcgatttcaacaccgacgacaaccgtttcgacgaggaggaacactgatggcagacggcatgaagatcgtttccgacaagtggatgctacaaagccgacaaatcgtcaactggggctcatacggcggctggcacgaattccgcccatccatggacgaaaccatgccggtgaccctgctcgccggcgccagcgaatcaggcaaatccacactcgtcgacgcgcaaatctcactcctctacccatccggaaccccctacaacaaggcgtcgaactccggacgttcggaacgcaacgactacacctacctgcgtggcatgatcggcgtaagcgatagcgaaaacggcgaaacgccgatcttcctgcgcggcaaagacgccgacggcaccccacagaacatctggggcgcaatcgtcgacacctacgtgaacaaaaccgacggaggactgctctcctgcggcaaattcctctacctgaacgccggagacggacaagacggactacgccgccgctacatcacctggaaccgaaccatcgacccacgactcatggaccagtaccgcaacacaccattcacccggtccatgttcgaaaaaacctatccggaatgcaccacgcacaccaacgccgcggcattccacgcctccatctggcaggacatgggcctaagcgccgacgcctgccgcctcctgcacaaaatacaatcggcggacgccccctcaaaactcgacgacatcttcaagcaaggcgtgctcgacatacccgaatccatccgcctcgcccacgaaaccgtcgacgactacaaccggttcaacgaaaacttccacagcatggaagacaaaatggcccgcgtcgccatcctgcaaaacatccagacacgctacggcgaatacgcaaagcaaaccaccgaacgacgcgaatacgaacccatcaaccccgacagcgaacatggcaacgcaacactgtccgcatgggcgcgctcgcgcatggccagcgaagtgcgcgctggtctgccggccgcgcagcgcaaggtcaaggagtcgcaggaggccatcgatcgggcgatgcagcgcgtcggcgagctcaacacgcgaatcgacgccgtcaaggaacgtatccaaggcatcgacggcggcagtctgcagcagctcggcaaggatcttcaacgcgtgcgccaggacatcgacgaggcgagcaggcaacgtcatgccatagccgaacgattcgaacaggtcgaaggcaggcttcccgacagcgagcagacatgggacgccaaacgcgccatgctcgccgaaacgctcgacacatacgaggaacggttgaaggacgcgaacgccagattccagcagctggtaggggagcgtcacgaccgccagcgcgaccgtgacagcctacgacgggactatcagcgcaaactcacgcacaggacgcgcatcagcgatgacatggacgacgcgcgcacgcttatcatgcgggcgaccggattggacgcgtccgaactgccgtatgtggccgaactgatggacgtgaacgaacaggacgaacagtggcgtctggcaatgaacgtcacctacgcgcccatcgcgcagaccatcctcgtcgacaaacgccacgagcaaggattcgcggcgaaaatcagcgccatcgacccgaaactcatgacacgacgcacgtggcggttcatcgacaccggcatgcaatacgaatcctctgccagcgaaggctggatgtcgtcgaaactgcaataccgggaggactctccgttcgccggatggctgaaaaaccagacgacgtcgccacggttcgacgcgcgttgcgtgcacgccatcgacgacatgaaccatgacgaacgacaagtgcaggccgacggacaaatcaaatccggcgaccgtggattccacggcagcaaaggactacaccaggtcatcggcttcatgaacgaacaatacctggccgaactgaaaaaccaactcgacaaggcggagcaggcgttgcagaacgccgaccgtcgaagcgaacaaatgtccaacgccatcagcctgctgcaagacgagcacgagctcgcacgaatcgtagccgacatgccatggagcaaaatcgacgtgaacggactacgggaacaggaaacgcgaatccgcaggcagatcgaacgcatcgaaaacgacccggaactcggccaactgcaaaccgaactgaaacagctcaaccaacaggccaccgccgaaaacagaaaccagtaccaagccgaagacgacctcgacaaggcccaacacgccgtccaagccgaacaagcatggctcgacgcctacggcaacgacgacttcgacgatgccacactatccagcatggtatcgaacctactcgccgacgcatacgagaactgcttcggcgcatccgtacgcgcgcaagaccggccaaaactcatcgcaggcctcttcgaccatgaaagcgaaacaccattccacgcgcgcgcgctacgcaacatcgcacgcatcgcacgcacacgaatccaagaaatcgacgccagatccaaccaactgcgcgccgacacggaacgcatcatggacgactacctcaacaaccactccacagatgacaacaccgtcatggcaagcgtggaagactaccgatacttcctcgacgaactcgacgaactcaacatgctcgtcacccgcgccgcaaccgacgaagaatacgccaacagcgtcaaaaaactctacatgagcttccaacagctcaaccgcgcgctacgcaccgacgaagaaaacatcaaagaacaactcaaccgcatcaacagcatgctcaaaggacaacaattcggcccacaaggcggcagactatcactcgacgtgaccttcagcccaatcgaccgacaattcgaaacaaccctcagccgcatcctgtcaaaactggaagactggacgcgcaacgcaagcgacaatcccacggaaacacgcaaagcattcaacaactgcgaaacattcgtgaacagactgcacaacgaactcgacaaaatacacgacaccaacggcatcaaagcatacggcgcacgcaacctcgacccacgcgtacgcagctcattctacgcaatcgtgcaccacgacaacgcccccgacgaacgcatcagctccaccggcggaaaatccggcggagccctccaagaactcacctcattcgtctacggcgcggccctcatctacctcctcggcggcgacctcaccgcacgccccacctacaccacgctcttcctcgacgaagcactcatcaaagccgacggccgctacaccaaacgcgcgctcgccgtactaccccgactcggcttccaaatcatcgtctccgccccggaaagcaaaaccgcggaaatcctcaacgtcgccaacagagcatacgtcgcatacaaagacccatccaccggcaactcatacctacaggaactcgacagcgaaaccatcacacaggacgaaacacagcccaccaccgcacccgcgaaaccaacaacggaggcataacccatggcaacggccagaagcaccaccaacagcgacatccacagccaactcaacggatacgtcaccgactatctcaccaagcacatgtatgacgccaacacctcctggccattgcgcaaaaccatccgactacccaaacaagccgaactcgaagcccattacacgcacatccgcgcccaagacgaagccatccgcaactgggcacaacaacaccactgcgaaaccagcgaaaaaaccaaaatcatctccaacggaatcgtccgacaaaccagccaactcatcgactcggtaaccatacccgacctcaacacggccctcaacatcaccacaccacaaacacgcaaactctaccaacgcgaacaccaacgcgcacacaccatcaccaaccaattcaacctcgactccaacacctccataaacatcgccaaaatcctcaaaaaccacgacgacaccgacttcaacctcgtcatacaagccgcacactacttcgccaaccacaacaccgaaaacatgaccccacgcatggtccccatccccggattcagcgcaaaatggctaggcaaaacaacatcaaaccgctgcaaagcaatctgcaaactcctcaaacgagaacaactagccctcaacgaccgccacggagaaatccgactccgactcctcgacacacaacaccacaaccaaccagacctcatcgtgacacaaccatggacagacggcgcgccacacgacatcacccacatcatcatcgtggaaaacaaagacacctaccaagccatacccacaacagaacacgccatctgcatattcggcagcggacacgcggcgacccgaatcaaaacactactaccttggatcacaaccacaccccacatcatctactggggagacatagacgcagacggcctcgaaatactctccgaactacgacaaaccggcatcacctgcgactccatactcatggacagcacagcatacaaaacatacgaaccatacggcaccaaactcgacaccaaaaaacaacccctcaaaacacgcgaccccaaaccaacaccaggactcacacaacacgaaagaaacttatacgaacaactctgcaccgggaaaaacacaacctacctacgaatcgaacaagaacgcatccccatcaacgacgcaatgacaatactccacaaccaacaccaatggaacacaacacaccacaaataggacacctgttcgaaatcataacgaaaatgaggtatcctaaacaactagaacaaagaacaaccaccagcggaggcaagccgtggcaaccaaacgcaacaacgcagcaaacggcgacgtcatagtcgaacgcgttctcaccagcgacgcattcctcgcaagagaaatcaaaaaagcccctctcaaaacgaaaaacggttcacttacagccgacctcaagcacctgcccaacgacctcaaaatcaccatccaaggcgctcgcgagcataatctgaagaacgtggatcttgagtttccgcgcaatcgcatggtggtgttcaccggactgtcgggttctggcaaatcctcgctcgccttcgatacgttattcgccgaaggccaacgcagatatgtggagtcgctgtcggcgtacgcaaggcagttcctggggcaaatggacaagcccgacgtcgatttcatcgaaggtttgagccctgcggtgtcgatcgatcagaagaccacgaaccgcaatccacgttcgactgtcggcacgattaccgagatttacgattatctgagattgctgtttgcccgcactggcattccgcattgcccggaatgcggcgcgttggtcagcgcacagacgccgcaacagatggtggacgcgttgctgcagtatccggagcgcacacgattccagattctcgcgccggtcgtccgtgggcgtaagggcgagttcgaggatctgcttgaactcttgcggggcgacggctacgcacgagcgctgattgacggcgaaatgaagcagctgtccgacgacatcaaactcaccaagcagaaaaagcacaccatcgaagtggtggtggatcgactggtggtcaaggacggcatccgtcagcgtctgaccgattccattgaaaccgcattgaagctcgccaagggtatcgtggtggccgattttgtggatttggatgagaaggatcctgaccgccgtaagcctttttccgaaaaacgcgcatgcccgaacgggcatcagcttgaacttgatgagattgagccgcgcacgttctcgttcaacgccccgtacggtgcctgcccggtatgcacgggcatcggatacaagctggagattgatccggaactggtgattcccgatcccagcaagacactgaatgagaacgccatcgaaccgtggggcatgaccaaaggcaccggcgaatattatcgccatgtgcttgaggggctcggcgatgagatgggtttcgatctcgacaccccttggaaggatcttccggaagaggcccgtcaagccattatgtatgggcgtgatttcaaggtgcaggtctcgtatcgtaaccgttggggtcgtatgcgcgaatattccaccggtttcgaaggcgtggtgcgtacgctgatgcgtaggcatgacgagaccgactccgatcagatgaagcagtattacgaatcgtatatgcgtgaagtaccttgtcaggcatgccaaggccgtaggcttcgtccggaagtgctggcggtgaccgttggcggggaatccattgccgatgtgtgcgacatgtccgctgagacaagcctcgcatggatggacggcttgcagcttgaagggtcggccgcgcagatcgccggcgaggtgttgaaggagattcgtgcccgtcttggattcctcaacgacgtcggactgaactatctgacactgtctcgtgccgccaaaaccttgtctggcggcgaggcgcaacgtattcgtttggcgacccagatcggttccggtttggtgggcgtgatgtatgtgctcgacgaaccatccatcggcttgcaccagcgtgacaatgagcggctgatcaccactctgcatcatctgcgcgatcttggcaacacgctgatcgttgtggagcatgacgaagacactatcaagaacgctgattgggttattgacatcggacctggagctggcgagcatggcggcgaagtgatctattccggtcccgcgaaaaagctcgttgacgctccgcgttcggttacgggcgactacattgccggccgccgaaagatcgaggtcccgcagtcccgtcgcaaagtacgtaagaccaagcagttgcgcgtggttggagcccgcgaaaacaatctgaaggatttgacggtcaacttcccactgggagtattcacttgcgtgacgggtgtttcgggttccggtaaatccactttggtcaatcagattctgtacccggtgcttgccgacaaacttaacggtgcgcgcatcgtgcccggcaagcatacccgtgtggaaggtgtgggccagtgcgacaaagtgatccacgttgaccagaatccgatcggacgcactccacgttccaatccggccacctataccggagtatgggataagatccgcacgctgttcgccaaaacccctgaagcgcaagtccgtggatacggtccggggcggttctcgttcaatgtcaagggtggccggtgcgaagcatgccatggcgacggcactttgaagatcgaaatgaacttcctgccggacgtgtatgtggactgtgaggaatgccatggcaaacgctacaaccgcgaaacgttggaggtgaaatacaatggcaaatccgttgccgacgtgcttggcatgccgatcgaagaggctgcccagttcttcaaagcgtatccctccatctcccgctatctcgacacgcttgtgcaggtcggacttgggtatatccgactcggacagcctgctccaacgctttccggcggcgaatcgcagcgtgtgaagcttgcgaccgagttgcagcgaaggtctacgggcaaaaccgtgtatattcttgacgaacctaccacgggtttgcattttgaagatgtgcgcaaactgctgcttgtcttgcagggattggtggataagggcaataccgttattgtcattgaacacaatctcgatgtggtcaagtcggccgattggatcatcgaccttgggccggaaggcggtgacggaggcggcaccatcgttaccgaaggtacgccggaacaggtggctcaatgcgaacagtcttggaccggcaagttccttaagggcatgctgtgagcgcacccatcgagcggcacagccaggaggtttggcgcaaaaccgccgaacagttgaacggcgacggtttcagtgtcggtggtgatgattctcccggcaaagacgtaaacaagaacggcgcgcctctgctgggggattcacgtgacctgtttcgtccgaaaacatccgacattccggcgcagccgggcgtatacaagtggcgagatggtgaaggcagggtcatttacgtaggcaaggcgaaaaacctgcgcaaccgtttgaccaattatttccaaccgttgtatcagctgcatccccgcactcaaaccatggtattgacggcccgtaacctggaatggacggtcgttggtaccgaacttgagtcattgacgttggaatacacgtggatcaaagagtttgacccacgattcaacgttgtgttccgcgacgacaaaacctatccgtatctggcgatctcatccggtgaacgcgtgccgcgggtgtgggtgaccagaagccgcaaacgccgcgatacaagatatttcggcccgtacgccaaagtatgggatctgcgtcacagtctcgaccgtctcctcaagacttttcctgtgcgcacctgttcgcagaacgtttatcataaggcggaaatcactcatcgtccatgcttgcttgcgtccatcggcaaatgttcggccccttgcattggacgtatcagcgtcgaggaacaccggaagatgtgcgaacagcttattggcgtattaaccggtcgcatcggcaaatcgtatatcgcacagctcacgcgtgaaatgaaggaggccagcgacgagttggagttcgagaaagcggctcggttgcgcgatcagatccagatgctatccacagtgggtgagcagaatgccgtggtgttcgattccgatgtcgatgcggatttcttcggcgtcgattcggacgagctggaagcttccgtgcacgcgttttacgtgcgtgccggttccatccgaggtgaacgcaattggagtgtggaacgggttgaggatgtgacggatgaggagctgattgccgaccttattgtgcaggtgtattcggaaaccgcaggggagacgattagggcttcgcagtcgactgttgtcaccgaacaacgcaatgccatcggatcgacgcaaatcgtgacggcgaccgatgcggtggcacgcgcgcaagctaccagggaacgtaacgagcggcaggatcagaccggtcgtgcggatttgttggctcctatctctccggtgccgcgcgaggtgattgttcccatcgagccggcccggcgtgaagagcttgaatcatggcttagcggattgcgcggtggtgccgtgagcattcgcgtggccagcagaggggataagagacggcttctggaccgtgccaacgataatgccaagcaggcaatgcagcgcagcaagatgagtcgcatcagcgatatgggcgcccgcagcacagccatgaatgatgttgccaaggctttgggacttgaacaggctccattgcgcatcgaatgctacgacatttccaataccgtcggcggagcgttccaggtcgcttccatggtggtattcgaggacgcgattgccaaaaagtccgaatatcgtcgtttcgccattcgcggagcggacggacagggtgcactcgacgatttgagcgcattgtacgagacgctgacgcgacgattccaacatggcaatatcgccggtgactccggcgaaagcatggataatgaacgtcgggcatccgagcatggtgaccagactcatgaaccgactgtccagcagaacaccaatcggcatcatttcgcatacaagcctaatctggtggtggtcgatggcggcaaaccgcaggtcatggcggccgcgaaggcgcttgaggattgcggtgtggatgacgtggccgtgtgcggattggcaaaacgtttggaagaggtgtgggtgccggatgacgactatccgatcattctcaaacgtcaatccgaaggcatgtatctactgcaacgcgtccgcgacgaatcgcatcgttttgccatcacctatcatcgtcagaccagaaggaaaggcgcgttgcgttccgccttggacgatattccaggcgtcggcgaggcataccagaagcgcctactgagccatttcggctcggttcgtgccatgcgtgaggcggatgtcgaggatttcgagcaggtcaaaggcgtcggaaaagccaaagccgcagccatttaccaagcgttgcacgcccacgacgggcaaccgtcgacggaaaatgccatttcgtcgaatagtccgaaagatgaaatggaataagattgggtagcgaaaaaagacaatcggattgctagcatgatgacggtgaatatatagggagggaatatgaccgaggtcaaccaccggtgcgcggttctgggcaagcccatcgcacattcattgtctccggtgctgcacaatgccgcttatcacgcgttgcatcttgacgactggtcgtacgacaagcatgaggtgggcgagcctgatcttgagggctttcttgaatcgcttgatccgacctggtcgggactcagcctgaccatgccattgaagaaaacgatccagccatacggaacaccgtgcaatacatgggccaaagagcttatggttgccaataccgcggtgtttgattggaccaaaacctgcgtcaatggcaattcgaacatccccttcatcaggctatataacacggacgtacgcggcatcgaactcgctttcgaacactcgtatcagacacgtgcgataacgccgaagacggaccgttctggaacggccgtgatcatcggcaacggcaacaccgcaacgtcggcgttagcggcatgcgtggagatgtctgcgatcggacatgtcatcgttgtggctcgccatcctgagaagaacgccgatctcaagccacttgccgaacggtatatgccatcggaacagccgatcagcattgtcggcatggaccacgccatcgaagcgttgcgccaggctgatgtggcgataaacaccattcccggattggctgcggacggtattgccgaatcattgagaatgccaggtgtgcgcatgcatggaacattgctcgacgtcgtatatgacccacgccctaccaagctgatgcaggcatggcgccaacagggaggaatcgccattggcggcgagcagatgctgttgtatcaggccatggtgcaggtctggttgatgacgggaatctgggatgacgatccgccgagcggtatggttgatcaggattgcaccgcgcgtttggaacaagccatgcgcatcgcgcttgaggaggctctgtgatggcacagaaagacatcgacgtacaggcgaatggcacgcatgccagcgccccttcgccggctgaaggttttgaagtattgctgatcaccggcatgagcggtgcgggccgttcgcatgctgccgacagcattgaagacatgggttggtatgtggttgacaacatgcctccaaaactgctggtgcccttggtggacatgatgaccacgggatccaatattcacaaactcgccgctgttgtcgacgtgcgttcccgcgactatttcgatgacctgtccgcggtgctcagccatctggacgatcttggtgtgaaaacgcgtatcctgttccttgatgccagcaacgaggtgctgatcaaacgatatgaatccgtacgcaggcctcatccgttgcagcagggcaatcgactgattgacggcattctcgaggaacgagatctgcttgagaatctcaaagaacgtgcggacatcgttatcgacacgtcatcattgagtatccatcagctgtccacgaaattatatgaggccatgctcggatccggtccgaccacggtttccgtgcacatcttcagtttcggtttcaaatacggtattcccatcgacgccgactttgtggccgacgtgagattcctgccgaatccattttgggttcccaggcttcgctcgctgactggacgcgacaaagaggtgagtgattacgtactttccagcgaaggggccgcggacttcctcgactcgtatgaaaaggcgctttcgattgcgattgaaggatatgcgcaggaagataagcattatgtgactattgcgattggttgcaccggaggccagcatcgttctgtcgcgatgagtgaggctttggctaagcgactgcgtgcgagggggttgtcggtttccgtttccgcacgcgagcttgataagcggtcagcggaaaaatgaccgtattatgagagaatagtgtccatatgtaaagaaacctggctgtgattgtccaagatattcggtatcacagtaagccgtggcagtgcggaatgattccgcgactcgcctgaaatttagggaagaacagcaaggtaggaggttggctcttggctcttctggatgacgtcaaaagcgagctggccgcaatcgataacgaactgccgatcgccaaaaaggcgcaggcgacagcgatgattcgattcggcaatggtttgcactcggtggatcaccacattctcgtgcaggtgcagctcgactcccaagatgcggctgcttggctgcaggacaccatcaagaacctgtatggtcatgaagccacgcttactcctgtctctaggcagacgccaaccggcaccgtgcagcgttatgtgattcgcgtgccgaagggcagtacggcgctcgtgctgcagaccggcctgtacagccgttacaccaagaacatggtgcttggtcttccaagcgatatcatcaacggcaaaatcgcgcagatcaagtccgcatggcgcggcgcgttcctcgccaacggacgtctgtccgatccaggcaaggccagctatcttgaaatcgtgtgcccgaaccatgaggccgctctggcactggtctccaccgcacggcgtctgggcatcaccgccaagccgcgtaagctacgcagctccgaacgcgtcaccctgcgcgatcccgacgccatcgaacgtatgctcattcttatgggtgcgccgcgctccgcacgcgagtggaccggaaagcgttccgacggcgaagctcggggcaaagccaaccgtctggccaacttcgacgacgccaacatgcgtcgcagcgccaaggcggctgcggaagcatgcgacaaggttcgtcaggcgtttgagattcttggagatgacattccagacaacctcaaatcggccggccagcttcgtctcgaccatgctgatgcgtcgctggaacagctgggacgtttggccgatccaccaatcaccaaggatgccatcgcgggccgcatccgtcgacttctgcagctcgccgagaaaaccgaaaaggcgcgccgccagtcggcttgattgaatcttttatgcaaaacaccatgcctgttttcgaacagtatggtgtttttgttcgtttgggcttgtattattcgtaaatggcaatatggccattccacgcttacaagcggctaggaaaggatatacatgaagacactcaaggatcttggagatctcaagggcaagcgcgttctcgttcgcgccgatttcaacgttccgctggacggcaccacgatcaccgatgacggtcgtatcaaggccgctctgccgaccattaaggccctgcgcgaagaaggcgcgaaggtcattctgatggctcacctcggccgtccgaagggcaaggtcgttccggaactgtcccttgccccggtcgctgctcgtctcggcgagctgctcggcatcgaggtcccgctggctgaagacacctatggtgaggatgcccaggccaaggtcgccgcaatgggcgacggcgatgtcgttctgctgcagaacgtgcgttacaacccggaagaaaccagcaaggatccggaggagcgcgccgcttatgccaagaagattgctgcgctcggcgaagcgttcgtatccgatggcttcggcgtcgtgcaccgcgcacagggctccaattacgacgttgctgccgatcttccggctgctgccggcctgctggtcgagaaggaagtcaaggctctgtcccgcgctaccgttgagccggaacgcccgctgaccgtcgtgctcggcggttccaaggtctccgacaagctcggtgtgatcgaaaacctgctcgacaaggccaaccgtctggtcattggcggcggcatggtttacaccttcctcaaggccaagggcctcgaggtcggcacctccctgctggaagaggatcaggtcgagaccgtcaagggctacatcgagcgcgctgagcagaacggcgtcgaactcgtgttgccgaccgatatcgtggtgaacccggtcttcccgaagtccgatgaggacatcgctccggaagtcgtggctgccgacgccattccggctgacaagatgggtctggacatcggtccggattcccagaagctcttccacgacaagatcgtggattccaagaccgtcgtttggaacggcccgatgggcgtgttcgaggttccggctttcgctgccggcaccgaggccgtggcccagggtctggtcgacgctaccgcagctggtgcgttcaccatcgtcggcggcggtgattccgcttccgcagtgcgtaacctcggcttcccggaggatggcttctcgcacatctccaccggtggcggtgcctccctcgagttcctcgagggtaaggaactgccgggcctgaaggtgctcgactgattgcttaacgcataaccggaggtgctcccttatcaacaaaaaaggtgggggagcacctcttgttttcactaacccgaaaccacggcgtacgaacactgaatgaaataagaacggaggcaggcaaacacatggcatcgcaacgaattccactggtcgccggcaattggaagatgaacttcgaccatcttgaagccacctatttcgttcagcagctcgcatggaaacttcgtgacatccatttcgactaccgccattgtgaaatcgcattgatgccgtccttcacatcgttacgcagcgtgcaggtgttggtcgaatccgacaatttgaagattcactacggcgcacaggctgtttccgtaacatcgcagggcgcgttcactggagatgtgtctgccgatatgatcgcccacctcggctgttcgtatgtgattgtcggacattccgaacgacgaaagtaccatccggaagatgatgcgaacatcgtggatcaggtacgcgctgttttggcggccggaatgcagccgattctttgcgtcggcgaaagctacgaggaacgtcgcaaaggcattgagcttgatttcgccgtggggcaggtgcatgacgtcacacgcgatctttccgacgaggaagcgtcgcgtctgattgtggcgtatgagccgatatgggccatcggctccggaatggtggccactccacaatccgctcaggacgcggccaaggcgattcgggatgatttggctgaaactttcggcacgcatgtaggagagtccgtgcgcattctgtatggtggctccgtctcctcaaagaacgccgaagaattgattggcgagcccgatgtggatggattccttatcggcggtgccgcgctgaacgtggatgagctcaccagaatctgccagctcaccatgaatgcgacagtatgatgctcgcggagtaatgtttttatcgagttggcctttcaaggtgtggtcattattcggttttctcaataccttgcgctattgttaacagcagtgtttacgaactggaggttcactcgtgtccgctatggccatcgtcaagcttgtgctgcagattattcttgttattttcagcctcttgctcaccctgttgattctgatgcacaagggtaagggcggcggtctgtccgatatgttcggcggcggtctcacccagaatgcgggttcttccggtgtcgcggaaaagaacctgaatcgttggaccgtcatcatcgcggtgctgtgggttgccatcatcattgccctcggtctgatgacgaagttcgatctcatctgattggctttttgcttcggcccatgactggattacagtcatgggccgaagtgttttttatcgtagtattgtctacaacatacgagctaaggattgatttgacgtctttgaaaatcgagaaaacccaagaaaccacgatggtcgtcgcggatttggacggtactttgctgcatgatggcgaaacgttcgaggaacgttttcttacacaacgttccatcgatgtgattaaccgcatgcacgataatggcgtgaccttcgttgtggaaacggcacgtccggtcagcacaggcttttcgttcgtggaaaaactgccggttgatgccgttgcctatctcaatggagcattgatcgatttcaatccagcctcatcaaattatgaaatgctcacttcgccgatgctgccggaagacggccatctcaagaaaatcggattctcctcacagcgagcatgcgaagtctgcaagaatctgttgaatgaactgcccggtatggaagtcggcattgtcatggatgatgtgagatacaccaatttcgatgttacgaaatattggaaaacacagacctggcgatacactgactttgacgatgttcctgaaggcatcgccgataagctcattatcttccctaacgatgagcagcggaatcaggtcggttctcttgtgcccaacgattttgacgtacatatctctgagggatcgctgtggatgttgatgaatcctcaagccaacaaggagcatgcgttggatttgctggcagaacattttgagacgccgatgagcaataccgtctcattcggtgacgatttggtcgacattgccatgctacgtaaatccggcaggggagtggcggtggcgaacgccaatccggatgtgttgaacatcgcagatgaaatctgtccatctaataatgatgacggtgtggcgcagtggattgaagataatctgctgtgatgtctcgtgatattcaagagttacatgagttgaacttcgtgaattgaacttttgtcgcaaaaggatgcgaaatagttacatttgatattgaacttccgcaatttcgttagttggtttgtgttaggatttgaactagcgcttgatgaaaattgaactgaaaggactagtatggcggaatcgttctccaaccggttgaacgtcgctatggcgttccgcaatgtcaaacaaattgactttgtgcatgctgctgagaagttcaatatcaaacttggcaaaagtcatatgagtcagtacgtgagcggcaaaaccgtgccgcgtgccgatatcgcccattttcttgcggcttttctgcaggtcaatgaggactggctgatgggaaaggacgttcccatggagcagaacgtcgccaccttgcccgcaatcaagtctgatgaagcccaacatgatagcaatcctgcatcagcgcaatcaacagaaggaaagactatgcgcacctttacgaaatctcataagctcgacaatgtgctctacgacgttcgtggtccggtggcggacgaggcagcacgcatggaagccgcgggaacgcatattctgaaactcaatatcggcaatcctgcgccattcggattccggactccggatgaagtcgtgtatgatatggcgcaacagctccctgaaaccgaaggatattcaccgtccaagggtctgttctcggcacgcaaagccatcatgcagtatgcacagctcaagaatattccgaacgtctccatcgatgatatcttcaccggcaatggcgtcagcgagctcatcaacctgtcgctgtccgcgttgctggatgatggcgacgaggtgctggtgccttcgccggactatcctctgtggaccgcctgcgtgaatttggctggcggtaccgccgtgcattacatctgtgatgagggatccgaatggtatcccgatatcgacgatatccgctctaaaatcacggataagaccaaggcaattgtcatcatcaatccaaataatccgaccggagcgctttatccaaaggaactgctgcaacaaatcgtcgacattgcccgagaacatcagctcattattttctccgatgagatttacgatcgtttggtcatggatggactggagcatatttctatcgcatcgctggctccggacctgttctgtgtaacgttctccggtctgtcgaagtcgcatatgattgccggatatcgcattggatggatgatactttccggcaacaagcgtattgcgaaggattacatcgagggcttgaacatgctggcgaacatgcgtatgtgctcgaatgtcccagctcagtcggtggtacagaccgctttgggcgggcatcagagcgtcaaggattacatcaagccaggtggccgtgtgtacgagcagcgcgaactggtctatcagatgctcaatgaaattcccggcgttaccgcagttaagccgaaagcggcgttctatatcttcccgaagctgaacgtcaagaagttcaatattcactccgacgagcagtttgcgttggatctgctgcatgacaagcatattctgatcagtcatggcggtgcattcaactggcagaatccggatcatttcagggtggtatatctgccacgtatcacgatgttaaaggaaaccgtaagtgagatcggtgatttcttgagcacatatcatcaggcatgatgaccttgattgcttgaagggctttcatggtgtgaagtacgcgcagcatcgcgacactccgtccccaaatacttatagtcatactgaccataagtagggctacgatggctccggccttagggccgagccatcgtttcattgtgaaaggggatattgtgaacgatttgctcaaaggaatcggcaacgtcgtcaatccgaagcgtgtgttccgcgagctgactgacttcaagccgggggagtttgtcctgatcgcggtcatgctgttggcgcagttggtgtcattcttcgtgtccaaagattttccgcggcaggttgaattggtctgatttccggcctatgcatcgtgttcaatctcattctcgtcgaccgtgggcgactgaccaactatctgtggggcttcatcggttgcgccacttggctgatcgttgccatcatgaaccatctcgtcggagacatcttcgctcagatcttctacgtcaccatgcagttcgtcggcgtatgggtgtggcagcgccagcttgatcgtcaggaaaaaaacgagtatgaggaagtcaatgcccgcatgttcacatggtggcaaggcattctcgccgtcatcgcaaccatcgtgatctatctgattgtggtattcgtgtcgagccatactggcggtgtacaggttcggcttgacggcacgctgctgccgcttggtatcgtcggacagattctcatgacatacggctaccgcagccagtgggtcgcatggattattcttgacgtgatcaaggtggttatctggttcaaccagctttccgccggaggtcctggcgccatgtcgatgttcgttcttcaggtggtcatgttggccaacggtttttacggcgcatgggtctggttccacaagagcagcactatggccgtatcggatgatctgcaatcaagtatttgcacggaaagcataatcgcaaatggtggccgctgatcaatcaatcgttccgtcgcgagttcacaacgatcatattggttgttgggccggcttccgtcggcaaaaccacattggtgacacgcttgtcgaaattgtatgacgctccgatcacggtcgagtatgcccgtgaatttgaggaagcctgcaatgttgacgatgatgaacttaccgctttcgattacgagcggctgattctttccaagttctctcagaacgagcatgcaatagcatcgcatgccaatcatggcatcgttttttcttgatactgatgccatggttacgcgtgtctatgcggaacgctatctgccggccgatgagaacgccaagctgcaagccgacattcgatatggtgattgaacaggagaagcctgatctggtgttgctgattcctccgatcaccgaatatgtggatggtgggttccgtgcaatgcggtgggcttcggatcggtatcggttccatgagactttggtacgcgtcattcaggagtcaccgtatgccgaccgtgtggtgactcctgacaatccaacttttgaagggcgcaaaacgcaggcgattcaagcgatccgccaggccactggttttacgcctcgtaccggaataagctgaaaacatgtagagcaatagcagattccccctgccagaattctggcagggggaatccttagcttagatcgctaacacttaagcaagaagctcagccgttgacgcggtcgatgccagcctggacgtcagtaaggacggaatcccaggacttgatgaaggaagcgacgccgtcggcttccagcttgtcggtgacagccttgaagtcgatgcccagctcagcgagcttggccatgatggcgtgggactcttcgtaggtacccttgatggtcggagcgccgttgccgtgatcggcgagagcgttcagggtcttctccggcatggtgttcacgatgagcggggcaacgagctcgtcaacgtagacgcaatcggaataggccgggttcttagtgccggtggaggcccacagcggacgctgcttcttggcgcccttggcttcgagagcagcccaacgcggatcgttggcgaacttgttctcgaacagctcgtaagcgaggcgagcgttggcgatagcggccttgccctcgagagccttggcctcatcggagccgatctcctcaagcttgttgtcgacggcggtgtccacgcgggacacgaagaaggaagcgacggaaccgatgtgcttcaggtcatggccgttggcgtcagcctgagcgatgccttcgatgaaggcatcgatgacctgctcgtaacgctcgagcgagaagatcagggtgacgttgacggagatgcccttggccagggttgcagtgattgccggcaggccttcgagggttgccgggatcttgatcatggcgttcggacggttgaccttctcccagagctcgacagcctgctgctcggtggcttcggtctcgtgggccagacgcggatcaacttcgatggaaacgcggccatcgacgaaatcggtggcttcggcgatctcacggaagatgtcggtggcgttgcgcacgtcggtggtggtgagctcgcggatagcggtctcaacgtcaaccttgccgagctccttgagctgtgcatcgtacgggccgacctggctcagagccttctggaagatggacgggttggtggtgacgccaacgacgttcttgtccttgatgagctcctgcaggttgccggattcgatacgggtgcgggacagatcgtccagccagatcgagacaccggagtcagaggtgcgctgagttgcttcagtcattgtttttctccttgatacctttttggatcaaatctttatttattgtgcggtaaaaggggagaggcacatgcatcatgcccctccccgtcgaatcacttggcggcttcgacttccgcaatggaggccttggcggcttcgacaacatgctcggcggtgatgcccaggtcgatcatgttctgagcaccgtcgccctgcaggccgaactgctcgatggaaaccggcttgccgtaggagccgaggtacttgtaccacggcatggcaacgccagcctcgacggagacacgagccttgacggaggccggaagcacagcttccttgtactcggcgtcctgctcctcgaaccattcgagggacggagcggacacaacgcgagccttaatgccttcaccagccagggtcttggctgcggagacggcccactgcacttcggaaccggtggccatgataatgacgtcaggggtgccctcggtgtcgacaagcacgtaagcgcccttcttgacgccgtccttggccttctcagcggtttcggcaagaaccggaacgccctggcgggtcagcaccatggctgcaggcagagtgttcttcttctcgaagaagtaacggtaggcttcggcggtctcgtaagcgtcggccgggcggacgacctcaagctgcgggatggcacggaaggaagccaggtgctccaccggctggtgggtcggaccatcttcgccgacggcgacggagtcgtgggaccacacatacaggttcggaatctgcatgagggcggccagacgcacagcggaacgctcgtagtcggagaacatgaagaaggtgccaccgaacggacgggtatgggagcccagcaggatgccgttggtgatggtacccatggtgaactcgcgcacgccgaagtgcagctgacggccgtacgggctgcagaccggccactgcttggtggcgcactcggcaggagcgaaggtggcagcgcccttaagatcggtcttgttggagccaccgaggtcggcggagccgccccagagttccggcatgacagcggcgatggcgttcagcacggaaccggaagcgccacgggttgcaacgcccttgccgacttcgaaggtagcctcgaggtcatcgatggccttgtcgaagccctccggcagttcgccggccttgaggcggtcatacagggcagcgttgtccgggttggccttgcgccatgcgttgtacttctcgtcccattccttgtgggcttcgaggccgcgctcggcaaccttgcgtgcgtgagccagagcctcttcgtcgacatggaaggactcttccggatcgtagccaagcagttccttgaggcctgcgacggcttcggcgcccagcttggagccgtgagaggacggatcattggtcttgcccggggtcggccatgcgatcagggtatcgaccttgatgagcttcggctggttcggagcggcctcgcgagccttggcgatggtgtcggccagaccctcgacgtcctccttgtaggagccgtcaggctggatgaagctgaactcgtcggtgtaccagccgtaggcctggaagcgcttgagcacgtcctcagccagaaccagattggtgtcgccttcgatctggatgcggttggcatcgaagatgacggtcaggttgcccagctgctggttggcagcgagggaggcagcttcgccagagataccttcttcgatatcgccttcgccgcagatgacccagatgttgtggtcgaacggggattcgcctgccggagcttccggatcaagcagaccacgctggaaacgctggccataggcgaaaccaatggcggaagcgaagccctggcccagcggaccagtggtcatttcgatgcccggggtcagaccatattccgggtgacccggggtacgggtgtcagcaccgccgcggaagttcttcaggtcatccagagtcaggccgtagccggagaagtacagctggacgtactgggtgagggaagcatgaccgccagaaaggatgaagcggtcgcgaccttcccaattgggatcgttcggatcatgcttgatgaaatgctggtacagagtgtaggcgataggcgccagggagacgggggaacccgggtggccgtgtcccgcacgctcaaccgcgtcggccgacaggaccttggccatcttgatggcgcgctcgtccagctcggtctccttgaattcggtcatggattactttccttccaattggtcgggccgcgtatccggcttgtgccgagcgctcgacgccctcacattgcgttttccatagtagcgatgtgaggtgacgttgtggtggttttttggcgtgttttggtagtttgtgttctgttaacgctcacagttaacattctcgtgcgattgctctgttcgattggtggtatgacgagcatttcgggagattgctatcgggaaaaacgagaaacgagtactctggaagcgaacgtattagcactcgcgcctcgcgagtgctaatacaatgggagaagtatttacggaagacggtttctcctaatatcgcagatattccgaaaaccggctcccgctgaatcgtatcgtgtatacataaagaggaggcacgcatgacgcagtcaagacgtatgttggtgctgcgtgccgtcgtcgaggactatattcgctcgcaggagccagtcggttcgaccaccttgaccaaagatcatgatctgggcgtcagctcggccaccgtccgtaatgatatggccgccttggaagatgagggatatcttattcaaccccatacgtcggcagggcgcataccaacggaaaaagggtaccgatacttcgtggaccgcttggccacagtggtgccgatgtctgaagcgcaacgccgtggcatcaacagttttctgtcgggatccgtcaatctgcaggacaccttgcagcgcgcagcccgccttctggcacagatcaccggtcaggtcgcggttgtggcggccccgtcgttggcgaaatcgacattacggcatatcgaaatcgttcccgtatcaatcaacaccctgttggccgtcgtcatcactgacaccggccgagtggcgcaacatatactcaacgtttccgagttgccggacaccacagtgctgtcgcatctggtcaacgaaatcaacgcgcagtgtgccagcgtttctttgacacgaaccgcggactatgtcaggcagatgtcatcccgcaaggaataccgccccatcagtagactggcggaaacgcttgctcaagctttcgatggcatggccgacgacgagcgcgcgagcgaactctatatggcaggaacctcacgactcgcgcaccagcgtgccgtggccgatcttgcaccattgttcgatgcgctggaagagcaagtcgtgctcatgaaactcatgagcacgttgagcgaaaccacgcaatccgatggagtcggagtggccatcggctccgaaacgcacacgcccggtctgctgcatgcatccgtggtgaccagcgggtacggtcgaacctcggcaaccgctgacgacgtaacaaaaggcgagactgcggaggagcaggggagagagacaagcaatcacaccactgcagcgcaggattccaccgagcccatcgccttcgtcggatccataggaccgacgcatatggactatgctgcgaccatggcagcagtgcgtgccgttgccagatatctgaccgcattcgtggctcacgacgaaaaccaaaacaacagctgaccccgccttatggcacaatgacacgcgaaaagcaatagggagaaagaacaaccgtgacggactattacgaagtgctgggcgtagaccgctccgcaagcgacgacgagatcaaaaaagcttatcgaaagatgagccgcaaatatcatcccgatatcgcaggtccggaattcgaagacaaattcaaggaagtcaataacgcctacgaagtgttgtccgatccacagaagcgtcagatgttcgacgccggcgtggacccgaacgatccgaacgccggcggcatgcatggcggattcagcggcggattcggcgacatgggtgacattttcaacatgttcaccggaggtgctttcggcggtggcaacggcggtccgacccctcgtacacagccgggacgcgatgcactggccacagtgaccatcgacttgaagactgcggtgttcggcgacaccgcacatgttgaaatcaaaacgttcggtctgtgccaggaatgcgccggcaccggctgccagaaaggtacccagccggcacagtgccccgactgccatggtcagggctacgcacagcgcgtggtgcgcaccatgcttggccagatgatgaccaccgctccatgcgagcgttgcgagggacatggtaccgttatcgaaaatccgtgtccgtcctgccttggtcatggtcgtgtgcgtatcacccgtaatgtcggcgtgtccgtgcctgccggcgtgacgaacaatacccgtctgcgtctcgctaatcagggcgaggtgggtgaaaacggcggtgttgccggcgacctgtatgtcgacatccgcatcgctcaggatgacaccttcactcgtaacggtgatgatttgcactgctggatccaagtgccgatgagctgggccgtactggggcatgatctggaaatcgacacgttcgatggcaagcagtctgtgagagtgcctgcaggaagccagcctgacgacactgtgaccttgaagaatctgggcgtcacgcatcttaacaacaagagcgagcgtggcgatctggtggcgcatatcgcagtgaagattccgacaaagctcactgacgacgagcgtgccttgatggaacggtttgccgaaaagcatgacacagatgcccaacatgttgcggtaagcgcacgcccgacttccggaacgaagaagggcttcttctccaagctgaaggatgcactgcgctgaatttccctatcctcatgtcgtacatccgatgagaaaacgttagatcgcatatcaaatagccggttgcttcaaaaacgaagcaaccggctattttgtcaatgtttctgctgtagcaagcggattgcctcacgcctacaacagccaatcattaggcatatctacgtgtttatttgagcaatgaccggcacatagcgcgatactggttcacatagccaccgccgaagaacacgcagtggcctgcgatggggtagagctgccacaatgtggtgcgctcctgccatcctgctttcagcggatgtacggactggtatccgtcgagaatgtcccgcaagtacgacatgccgaataggtcaagcatggcgagatcctcttcacgatgcccgccgtgcgcggctgggtcgatcagcaccgcttccacggatccggaatcggccgaccacatgacattgccgctccacagatcgccgtgcactcgtgctggcttgtcattggccgccttgcccagtatttcaggcaacgcttcaatgacggcctcagtcagttccatatcgtaatcagtgagttcacggcgcttcataccaagctgtaccatcgggcggagcctgccttcggccaaatatgtcgccacatcatcccattcgcctgcgtccatgggaacgggatcctgcaaggggccgaaataacaagttcccgtatatccggctggggcagatccaaagtaatcggctccggcatcatgcatacgcgcgagagcagcgccgaaatcatgcgcggcctgcaaagtcggaccacaggcgttcactcgttcaatgttgagataatccttgccccagtcgtacacgtctaccacacgtggcccgcctttggattgcgcttcgccaagccactgcaggccacggccctcgcattcgaagaaaccttcaggactgaatgccctgctcttgcgatatttgctcatgctgcccgacctttccttgcatgatccgccacatttgcgagaccttatggaatcgttagtgaagctccgatgggttttggcaccattgtgtgcatggtttgagacaactcaaggatccatagcgaaaaattagacccctctcgctagtcttggatgcggaaaagcagacgaaaccattgatacatataaaagagggttcatgaatttcttccaagcgattttccttggtctggtgcaggcattgaccgagtacctgccagtttcttccagcgcgcatattcgcattatcggcgatttgatgctgggatccgatccgggcgccgcgttcaccgcaatcatccagatcggcaccgagcttgccgtgattttgtatttccgacatgacatcatccgcattcttggagcatggttcggttccctgttcggcaaagaaggcaaggatttcaaaagccgtatgggagcgcacaatccagacacgcagatgggctggttcatcatcctcggcacgatgccgattctgattgccggcctgctgttcaagcatgcgatcgaagggtcactgcgtaatctgtggatcaccgtcaccgtacttgcattgttcggcgtgctgctgtgggtggtcgacgcccgttccaagcaggtcaagaccatgaaggaaatgacctggaaggatgcgctgatcttcggcatcggccagatgctcgcattgattcccggcgtttcccgttctgggggcaccatcacctttggacgcgccatgggatacacccgtgaggcagccgttcgagtgagcttcctcatggccattcctgccgtgttcggcgcaggcattctggaagccgtatcggccgtcaaggacgttgccgcgggggatgccggtatgttccccggctggggtcctaccatcgccgcagccatcgtggcatttgtggtcggctacgtggtgatcatcggcttcctgaagtttgtttccaccttctcgtacaaggcattcgccatctaccgcatcggcttggcgatcgtcgtggcattgctgctgattaccggcgtgctttcgccgctggaagccgcagctgcagcgtgaatctaattcgataatcgaataacaaaaaagtcgggccgatcatcctgcgatggtcggcccgacttatatattcactgcttatcgccaatcacaacttaattgccacgcaagaacgattcagcctcacgaatcagctcttcgcaagcgggcatgccattcgacgcgatacgttgcgcttgagcgttcaaatcgtagtcgcgttccagacaggcaagataatcgccggcatgcgtctgctcgacaatctcgtcggcagccttgcgccattcggcggcttttctgttcaaatcaccttcagtcagcggatgctcaagtaaaagagacaatgcgcgaaccaattccagcgtgccctgcaagcactcggtattcgcacagtaatggggtacggacacccacatggatgtggtatgaaatcctgcgtccgccgcaaatgcgtcaagaatgttggggatgcccacagggccgttatattccttgtcgggttcgctttcgcagtcatttttggaaatgtcaagcggcaaaggcctggtgtgggggcaatcgtcgaacatggatccaagcgtgacgataccgctcacatcgtagtcttctgcgatgcgcaacgtctgcctgcagtattcctcccaacgataatttggctcgggggcgatctgagcgagaaaatgcagcgagggggagactgcaatgtcatagaacgtggtctgtggccagatgattcgtttacgaccttgtaccgagcaaatcatcggacgggctacctgatagtcgtagaaaccctcattgtcgatatgatgcacctcctgtgaatcatatcgcgacacaagatgccgtatgacgttcgtcgcagcctggcaggcgtcattccacccctcaaacgcggagatcattattgtctcgcgttttttcgtctcctcacacatgctttaaatgtataacgaaatcatatttccgcaaacacgcttccgccatcggtgaatgtgacgagcagggcatcccgatctagacaacagcatctcaaaatacccgaatgtcaagaaagctcaaaaccttttttcggtagataaaagccctttgaaaacagcaaaacacgaacacgacacgcggacttgcaaattttgagaatgcggatatagtagatactcgtgctcaggcagtagtactgcggagaacaggcggacatagcttagttggtaaagcgcaaccttgccaaggttgagaccgcgggttcgagtcccgttgtccgctctaaggtcccgattgattatcgacctttagggtgggttagccaagcggttaggcagcggcctgcaaagccgtatagacgagttcgactctcgtacccacctcttgttgtgcttgacatgtgcgagtgcgacgcatgacccgggcggttggcgcagaggtagcgcacttccctgacacggaaggggtcacaagttcgaatcttgtatcgcccactggaacgtgagttcctatataacccatcatcgggtgattggcgcagcggctagcgcacttccttcacacggaaggggtcataggttcgattcctatatcacccaccatcgggcggcacgtcgtgccgccttttttgttggtttcgttgggtttccgccgtttcgtgcggcatgtcggaaacgggtggcgcgtggtgttggttttgggcgccatagcgattcatggcgcctatacttccaggcaacgcaacatcaatcaaaaagtcgagcaggatctcagaggtaagctgggactgccggccacaggcgaaatctattacgtgcaggatcgtccgttgtatcaggagtacgagaatctcgttctgaccacctacgacaaatggttcggataccatccatgatggaacgattttcgacaaggccaacgttcctgcaacagaggagggcggtgattatgttcaccagtatatggtgattttgactgactacaaagaatcggttgatattggatggtatcaaatgtcttccagcaccgatgaacctgatgatctcgttcaggcaggcatcgacgaattccagaattatgagaaccagttcctgaaggatgaggatcttgtacggcctattttgatgctgttgtaaggcatgagttgtctcacagggaaatctgggcgcgctgcggaaccgctggtccgcctgtcgcgggcaacttgattggagctgcaaccaactcctatgcagtgaaatacatgggtgcggataaatcccagatcgagtccacgcagggagaagactataagatgacgcagcagagcgacgcggtggccgaggccattcactccggcgatgctcctaattcaagaagagccgtctgcaacaaggcattgcgggaaatgatcgacgagcagcgctgaaatcaatccccgcgaatataacttcgaatacagttttaaatccggaatacacactatccgggctttttccgtgttctttcaaggtgtacggctacaatggcagcttgtgagtgacgaagcattgaatctcaatcagccggtcaaagacatggggccgaacgagttgaaggcttatgccaggctcggcaaacagcagcatgacgaggcgaatcgtgagctggaacgccgttggcgcagctatgatgacatgttgccaaacgaccagttcgtgtcaattatcgacaagactgagggataagacccactttacggtgtatgattcgtgaccatgccggtctcaataccggctatttgcaagggtaatgactagaatggcgactatgactgatccgattccaagcgcaggtgaaacgaccatcattggccttcctgcaataaccgtaccggtgacttccaccggagaccgtcctctgacgaaagaggaccttgaaaccatcatgcgtcttgccgatggcacggcattgctgatctcgactaggggagcggtgtcggggtcgcggtatcttcttgacgaggatgagattaccgtcggccgtgatccaagagcggacattcttttggatgattccacggtttcccgcgcccatgcggtgttccgcaggtctgacggcaggtattccgttattgatgcgggcagcttgaacggcacctatgtgaaccgccagcgtgttgatcagcaggagctcaagaatggcgatgagattattcttggcaagttccgtctggtttatttcgacaataaagccgtcattgccggttgatccacgttatgcgggatagactgtgtacaacagcttcgcgcccatgagcttcgcacgaatgctcatgggcgttattgtagatgtcgtaggagagcgtgatgaacgaagcagagccaacaacgcggttgcgtctgcatgtgtcgactgcggtgcagggggagttattccccgcgaccggcactcagccggtgacgcgcggctacaagggtacggtggcttcaaaagtagcaggcatcacttatcgtcaacttgactattgggctcgcagacaaatcgtggaaccctccatcacgccgtcgcatggatccggttcgcgcaggctgtactcgttcaaggacgtggtgatccttgctgtgtcgaaaagactgcttgacgcgggcatcaatctgcaaaatgtgacgactgccatcagttttctgacgcagcgtaccgcggaacaacttgagaatatcacgattatgtgcgacggtcagcaagtgcacgaatgtacggatagtgagcaaatggtggcgttgttgcaaagcggtcgggcggtattcggcgtatcggtgggatctttatggaagcagatcagagagactcttgcccacgaggaatacgtcgatctgaccaccatgccttccatgatgggtggaaaccgacctgttgacgatatcactgcaatgcgcatgagaaagaacttcgaggcgcaacatcagacacgcgccgccgcgtcactgtaacataccagaatgcatgccgtatggttgatgcggactaagacggatgtacgagtcgttgatatgagatagatatgtacagacagacatacaacaggggagcaatacatgtttgatattctgccggcattgctgtggattgtcgcagcggtcatatcgttgaacatttgttcgattactgcaattcgaggaaatatcttctcaaaaaccaagagtgacgtatatccggtacgctggtcaattgtcggattgcatttcacatcgctgatcatcggagctctgccgtatccgatatatacgatgttcaaacccagcttttccttgaaatttcagcatttctacgaacaggttggttggccgtcggcagcactgatggttatgctcatcgccacggaactggtgtttatgtatctgcaggcccgaaacggcatgaaaagcgaaatggaaagaaaactcagccaagccattaaggactagccaaaaagacatccatcgaagcgaaaacgcagccgtgtggaaaaacgtccagcgaagcgaggacgcaccatccatcatgccggtgggttatgtcgagcaaagtcccgaaagggacgtgctggcataacccaccgatgttatgtacagaaaagagcgtcagtcgaaaactgctgtagcttttctgacataacatacattatcggacaaaagtgggagcaggtgcagggggtatttgagatgtacgcgatctctcaaaaccccaggtatgcaaatgtcatcgctggcatgcatacccaggggtttctttgtctttatgcacaagatgatccgctcgtgcatcagccgttatctatcaggcgaaatagtcttcgatggtttgcgcaagctcactaaccgaatcgatcaccttatacgcgccatgttctttcagctcgccaggctcggcataaccccagccgcatcccaagcaatccagaccgcacgctttggctccgtcagcatcggtccaacggtcaccgaccatgagcgccttatcgccagcggcttcgtcaaacccaatgtggtcgaacgcccattgaataacctgatctttgtcgagacgcgaattatcttcgctggcaccgtaaatgccgttgaccatggtgtccaaatggaaatgctcgcaaatcggaatgcactgatactgcggcttgcagcttgcgatcgccaagtagtatccgtcagcacgcagtttggccaactgttctgggataccgtcataaatggtattgttcaaacggcccggaaccttttgacccggattattcggatcatcgaacaccgcttcctgcgcataatacctgcggtagatggcaatgccctcatcgagtaagtcgtccggaatattattgcgctgcaacgactcgacaattgcaggaccaatgaatcgctgcaactcctcatcatcaggcactggataccccagttcctcaaataccttcaccacacaaccaatgatgcccggatcagacttggtcaatgtgccgtcaaggtcaagcagaacgactttcttgggttgcttggtcttctcggacatgagattaatgcactccttgttaaatgctcgatgcaatgtgaactgttcagataacaattatgcccggtcttactgaccgggcatgcagttcaagtgtcgttcaactactggttactcgtagtctggaaaccagccgtcgcgatgcatctgcagacgcttttcaagcaacgtcttcagctcgtcttcagtacggcgttccaatagcatgtcccagtgtgtacgggtcggcttggaaatctcgtcggcctcacgatcctcgtcgccttcacgatgcgcggtcatgccgcaccggcactcccattcctccggaacctccgcgccttcagcgaacggcagaatcgtgcggtgtccctttgggcacacatatgcgacgtcgtttcgcgccgcgaaatccacattgtcatcagattccaacgactttgcgccgatgctcatgcctcgcaggctgcgttctgccatattgcctttgcctccttggattgtctgctctgtctaagctacagaacagttcggacgtgtcttttattccttattcgtctgcttgatgttcgattttagtcgacgccggagtatgcgacgatgccacgattgatgcgatcgtacgcctgctttgcgactggcgccaacgtttcggcacgatccgcaagatacggtccagccacggctatctgctgaagcacgtcggcaagccgtttgccgttacgcacgaaatcgccgcccgtcagatcggtgccgtacagcacctgcgacaggctttcaccttgcgcccaatcgtagacgatatcggtgatgccaaaatcgagttggcgaggctcctcaagcatgtgatcctcacataacatggcaatcgacgcatggacgcccttaagctgcgctgcgcacacggcgacgttcccttgaatgcctccagggtaacgacgcggctctcccccgcctcccctgcgggcttcgaacaccaacgatgcgacgacgctggccaattcacaggcgttcaacccgtcaaatgcgccatcgtcaatcgcctgcgccaatactagatcaagctcgctgtacaaatgccgcaacagctggccacgttccgtgagctgataatcaccatggcccgcggattcccgtaccggctgaagatagccgagattggaaagcacagcgcaaatatgatcaaactgacgtgccacggaaccggttcgcgaatcgtaacgatgctgtacccgttccaactcgcgcatctcacgagcccaacgatgtccccatttcaagtgcttctgcacatcagggcatttacggcatggatggtcgcggtcttcttctctgagtttcttgatgcgtttgtcaagatccataaacgcctggctgcgttccttctgcgtacggaacacctcatgcttgagtttgcgacgttcgttcttctccaaatcactcaaacgcatccgcaaacgcatgaattttttgaaatcgccgaattcacactggaaagcctgctcgtatccttccagagccttgcataaggtttccatctgtgcttcaagctgccatgccgactcgttggcttcccattgcgcaaaggagtggtcaagcgtaacgcgagctgtttcatagtcgctggaattcaatagattgacagccatattgaaggtcggtctgaagcttgagtgaagcggatacactcgtttgctggacaaggcggccgcagtggcgggaacaaaaccatggtggtccaccacaacggcatgtccgatggtgtcgatgccacgtcgtcccgcacgaccggtcaactgggtaaactcgccgggagtcaacccaacatgcccggtgccgtcgaatttctcaagcttttcaaccaccacacaccgtgcgggcatgttaatgcccaaagccagcgtttccgtggcgaagaccattttaaccaagccttcttcaaacaagcgttcgacaatctggcggaacaatgcgaccattcccgcatgatgcggagcgaacccttcttccagggcgaaacgaaattgcgagaaatgcagcgctttcaagtcttcttggctcaactggccttcgaccatctcatcgacgatccgtctgatttgttgcacttcgtcgctggtggtgagttccaagcctgcgttgatgcattggtcaaccgcttgatcgcaaccgtttcttgaaaaaatgaagtagattcccggcagcatgtcaagaaaattcaactcgtccacaaccgcccagcgtcgaggcgtatggcgttcgaccttatgcgggcgatcgtcccatcgtccacctttacctttggccctacgcttatcaggacgtcgctcgcccttgcgccgttccgcctgacgatcaagctgatcaagtctgtttatcagctgcgcattgagtttgaccgtctgttcgccattggcgtcacgccgatataggtcgatgagttctggttcggtatggtcatctgcctgtacgagcacatgctgctccaacggtaccggacgctgttccgacatgaccaacgtggttttgccacgaacagattcgatccattcggaaaaatcctcgacattggaaaccgtcgcggaaagacctatgatgttcacgtttttcggcaagtggataatgacttcttcccagaccggccctcggaaacggtcagcaagatagtgcacttcgtcaaggatcacataacgaagcgcttcaagcgtcacggaatgctcatacagcatattgcgcaacacttccgtggtcataaccacaatatccgcctcagagttgatggacgtgtctccggtcagcaatccgaccttatccgttccatactggtcgaccagatcatggtatttctggttgctcagcgctttgatcggcgtggtataaaaggctttgacattccgcgtctgcgccagatagatggcgaaatcggctgcgacagtcttgcctgctcccgtaggagctgccacgagcacattatcgccagcctccaacgcatcgttggcttgcatctggaattcgtcaagctcgaatggcatggatcttgcgaattcggccgcaaccgtgcgctgcttggcctgcgtttgtttgaatgcggcataccgttgcgcgggagacaactccacggtctcattgattttcgacgggtcaataccgttattacggcgacgatgatgggtcatgattccttaatatggttgggtcaatcgttacaatgacgccattgtgcccactgttgagcatgacggcttcgcttcgcttcatgcctctcaatgactccggcatgggcatccgcataacgatctgcagcatcctttaaaggtctggtaaagaaaggcgcttcattctcgttgttttggggcaatggtttgcccatcgcctcgattcgttttgccgtccgttcacccagcttcgccacgtccttgaatgctcgatagccgtgtaaacatgcgtagacgactccggaaacaaccattgcaagcatgaacagagcgagcaacagccaaatccaccaaggcatagtctctcccccgtcagccttcattctcacgatcgccaatgctcagctcatgctgggcacgggcgacaatcatggtacgcaacgtttcgggagctacggcagtgatatgccgtgcgtgggaaatacagaatgcgacataccaggaatcggacgagacgatcagatgcaccttctcgccctctccgcacttttcgactgttgctcccgacagcccgtcaataaatgacagatcatcctgattggtgacgaacacagctggagttccattatcgaagctccatttgcgcaattcggatgcgggaacgtcgggaatgtcgattttcgcggtaggttcaaccagttcggccttttcaatgcgggaaatgcgaagcacctgccagatgcgaggctttcctgtggccttgttgatcgtggtgtctttcttcacgtacttagctttgtcagccggtgcagcggcagcgacgtcagtccatacggcaacgtagaagactccctcatcgacgaagatcttatctggcgcgacaagcttacgctgggtccttccggcgccatccgtatattccatgtcaagcagcaagctcttggagatcgcgctcttcacaatggagaaattacgcggttccatctcataaccggtcagactcagccaaggcatgtcccccggctcaacatgttgacgaagacggctgtacaacgattcagcctgttcacgcaacttgtccggcagcaacgacgaatgcgcaagatagctcaccgatgcggtaagcatgctcaaatactgctgggagatacctgccaagcgttccagcccaagcgaattcgtggcggaaacaatgccttcagcgtcaagcaacgaccagtcgatgtcaaagaactggcttcctgccatctcaccatcgtcggaaaccgtagtcagcgtgttgatgtctttatgaatgacattgacgaacttcttcagctcgtcatcggacttcggtttgccaatgaaacgttccgcaagttcctcaagcgaatattcttcgccgaggtgcgccgaaaggaacagcatcagacgcagacgacggtcgacttcactacccgtctggaatgcggaattcttcttcggacgccccttgcactcctctgcatcgtcgtcagcgctgttgcggttgatttccatggctgtgacagtggagctatcgcctcctgtggattcgtcggcaggcacgaactgcgtggcggcattcaaacggcggttgaacgcgtcgacagcctcctgaggactgacgatggaagcacccggatgagaaagcacgaacatggccagatcatcggaatcggtgtaggcgacgttcaaatgctcgccgtcaacatctacagtcgccgcgaaacgacgctggtcaacgaccttgaccaattcgtcgggaatggattgcgttcccagacccggagcgatggaatcaagaccaagccctggagtcggagtctgagggacgcgaggcgcggtacgggacgtatgctgcgtctcatgtgcgggagctgaggaaatcgacatggaacgggccagatagttggccgcggcaagaatcggcaaatcctcgtcgccgaacagcagacgaacgcgaggctcatctccaagctgcagacgataggatgcgaaatcctggccttccgacttagatgaatactcaggctgcctcgattcgatggcgatgcccatggccgcaagcttggcacggtcacgctggaattgcttggcaaaagccgccttcgccgcctgatcagccagctccccataggaatcggcatacgccttcacacgctgggcaatctgacgggaagtgagccattgcgggaaagctgaggaaagcacagccaatacatcaagttcgtgcttgccccatttgtcggagaaacgacgccttccgttactgccctctgccattagtcctcacgtctcgttaacgtttcatcttaagtgcctagccggttcaggctctgcacacacctctctatgatagagggttttcgttcagattgtgtctattttacgaaaaaatacagtttttcgtgttgaggctacccctcgaatcagacccaatcatcaggctcaacaccttgcgggccaacgtattcgccattcggaacataactcggctcacttgtgtcggtcagccgcgcgtcaccgaacagtatcacgtccctgccgaaggtccagtcaccatcgatgtcgacggaattggccgcggcaagcgacggaacgccataagggaatctcgtatcgaaatcatggatgttcttgtaataccgcgcatccaagtgaacatccgggaagacgtaattgccatcttccatctcgtactggtccgtcagatggaatcgatcggatcgcatgataaacaaatcgtcggtggttttcaccggcaggaaacgcatacggtcaacgcatacgcaggtagccccgtcgaacaacgtcaccgccgctcccatggctgtttccagctggatgaccggctcgctcgtcggatcggtcggatcgacggtcttgttattgcgaatcaccggaagaggaagcacgccatcatatgcggacagcttggccttcagagcgtcgatacgcacccagatgctgttcgtgttaaaatacggatgcttttcgatgttctgcgcatcatccttatcgtccggatgcacctggctcatctcacgcaacatcaagcggccggtcgccttgtcccgcacgatatgcccgcccttgcgatcagctggagtacgttttgcgacctcgatcatgaatggcgcaccggtattttcgaagtgctgcgccagcgtgcgcgaaggacgtgcgccgagattgtcggaattcgagatgaacaggtatttgaagcccttctcctcgaggacgtccaataggccggattcccaaatggtggagaacaggtcgccatggcctggcgggcaccattcaagttccggatttgccgggaagctgacaggaagaccggtttccgcaccgattttcggttcctgatgctgcacgatttccagaggaatgtcctcttgatggaactttttgttggcacgcagcaccttcatggtgtcattcgacgtgcggaaggagttcatcaacgtcaatggcagttccacacccagacgagtgcgtgcagtcagcacctgaccgatgatgatgtcgatgaagcgcatctgacgtgccttatggcgacgcactggcagcaaggacttggcgcaatccaagcccatggacgtgccgaggccaccattaagtttgaggaacgcggttttggcaaaagcatcgacggctttgtcatggttgatggtctcgtagacatcatggaagctaggcactcccaccagaggctcaacatcatcctcacggatccatgtgcttgcttcctcactgcgccaaacctcgtacagtcgtttgaattgcgcaatggccatatcggtcatcccgttgtcccgcatctttgcggcggaatgttcaaatgcgtcctcagtcaatgtctttccctttcgtgcgggcgtcctgttctcatcgtacctaggcaatactacgacaaaattcccatgacgggggcttttggtggcaaaaagggaaaattcttgacaaaaatgacatcccaagaactcttttatcatgtttcgcgaatcgtgcgacacgatgaatttgaaaaatagagcaggttgtgctatgtttcatgttcggtgctttttgcatcgttcggaccatagcgcagtttggtagcgcacttgactgggggtcaaggggtcgcgggttcaaatcccgctggtccgaccagaaaaacccgaattcatgcgatttcgggttttcttttttaggatgtcagtcttacgcatgcaggtaaggggtgattgtcttgaagtcgatggacgcccagccacagtttgacgacgttgacggctttgcccacgtgtttgactcatccgagcttgaggatgagtggaagatacgtctgtcccgggaacttggcgtagcggccagggagcgggcgaagcatgatggcatcacccttaccgaactgacgcgcaaggcgcttgaatgcgacgatctgaatgagaccacggacaccgtccgccctggacgaagaccgaagaacaccgacggtcgagaacagctcggagacgaatggaaaatcaaactcccctatgccatcggcaagatggcacgggagcgcgcgtccgaggaaggcatatccttgagttcgctcgcgcggcgtgcgatcagcggatatctacgtcaacgggatactgaggaacagccgctgttttaagcatgtgacaatgagtcacgcatgattggcgtgcactgatctagcaaatatggatggtggccgcacacccaaggaatggtgtgcggccaccatccatagaaacttacttgcgtttcttcttctctcgaatattcaccgaaatctgaatcggggaaccttcaaaaccgaattcctcgcgcaggcaacgttcgatgtatcggcggtaaccatgctcaaggaagccggtagcgaaaatcacgaaacgcggtggacgcgtcgaagcctgcgtcgcgaacaagatacgcggctgcttgcctccacgcagtggatgcggatgggcggcttggattttacccaagaacgcattgagcttaccggtcggaatacgcttgtcccatgattccagcgctccacgcatggctctggccagacggttcgtatgccatccggttttagccgacagattcacgcgctgagcccacgttacacggtcgaattctgtcttccacaagcgttccattcgctgacggtcgaaatcatccatcaaatcccacttgttgaacaccaaaacgatgcatcgaccggcgtccactgcttggctcatcaccttcaaatcctgatcggaaatcggttgggaagcatcaaacagcaccagcgcaagttccgaacgctcaatcgcggcctgagtacgcaaggatgagaaatattcggcaccagacagcttatgcaggcgacgcttgatgcctgcagtgtcgatgaacagccaatcctccccatcaaccgtcaccacttcatcgactggatcgcgagtggtacctgccaaatcattgaccacagtacgttcctcgtgagccagctgattcagcaaagacgacttgccgacgttcggtcgaccgaccaacgccacacggcgcaaatgggacggagtaaggaaaccggatgttttctcagccttcttcaacgaatccaaggcagcgtcaagcagttcgccaataccgcgaccgtgcatggcggaaatgccatacggctcccccaagcccatcttccagaattcagcggtcaaatattcgctctcacgatcatcaaccttgttcaccgccagcgtgaccggcttgccggaggcgcgcagcatcttgacaatgcgctcgtcggtgttggtaagaccaacctggccatccaccacaagcaccacagcgtctgcaagctgaacggcgatctgcgcctgggatgcgatggcggattcgataccttcgacgtcggcttcccagccaccggtatcaaccagcttgaaatcggtgccggcccattcggcatcgtagctcacacggtctcgagtcacgccgggagtgtcttccaccacagcagcgcggcggccgagaatacggttcaccagcgtggacttgccgacattagggcgcccaacgacggcaagcacgccaaccggcttcgggccggaccggcgttcgccgccaacgaacgacgatccatcgatcagtccttcatcgccctcatccaactcataatcgtcaagattggaagcgtactggcgatactgctgctcttcgatggcatcgtcgacaatgcgcacaagcacatcaagcgtttcgccgaaattcaaatcggaattatcgacggtcagcacgccttccgcggcagatgtgaaattcgtgaccttggaatcagctgcatctcgcgccgcaacattttctgatccgacaccatcagttgactgaccggaacgacgagcctgtcgcacctcttcacgggcggtgagcaacacacgcacttcagcatccggcgcaacaaccgtagtgatgtcacggccttcggcgaccactccggcaccctcagaaaaagagtcagacgcagcttcgcgtgcgatgtacgcgcgttgagcggcaatcagcacgtgacggacgggaatgatgttcgacaccttggacacatgggatgacacttcggaggaacgaataacgtcgctgatgtcttcgccgtcggcatataccttcgaatcgtctggatcgacgctgatgtcgaaatgaccttcggtaaagaactctcccacggtttcggtgaccagttgttcatcgatcgtctccgcgtcaaggtcaatgcccttgttcatgcaccaccatgcgcaggcacgatacatggcaccggtatcgaggtaagcgaaaccgtaatatttggccaacgccttggatgtggaagacttgccgacacccgcaggtccatcaatcgctacgcgaatcacaggcccaccgccttggacagggaacgcacctcggtctgcgaaagcacacggtacgatccggatttcagatcgccaagcttaatcgggccgatctgggtgcgtaccagacgcttgaccgggaatccgatcgaaccgaaaatgcgacggacgatacggttcttgccggaatgcagcacaaccttgaccagcgtgctgtcgcggctggcatcaagaatcgcgcaacggtcgagcttgatccaaccatcgtcgagctgcacgcctgtagtgaccagtcggcggcacacctgaccgctgatgcgaccttccaacgtggcgatgtaggtcttctcaacctcgtacttggggtgcatgacgtgctggctgagctcgccatcgttcgtcatgagaatcaggccttcggaatcataatccagacggcccatgtggaaaatacggtcatacttgtcgccgacgatatcgctcagggtgtagcgtcccttcggatcctccatggcgctcagcacacgcttcggcttgttcaaagcgagcgtgacatgattgggattcacgcgaacacgggagccgtccacacggacttcctgatgtttcggatcgacgcgagtgcccaattcggtaacaagctcgccgtcgatttcgacacgtccttcagtaatgatctcttcacatttgcgacgggatccgaatcctgcctgagcaagaagcttctgcagacggataccttcattatcgtgtgtgtgcgccttcgcggcgcgggaatatgcgtttggcatcgttctcccaacgtggccggataatacttatagggactgctggtactatggcagtcgtttggcgatttcccaaaatcgcaacttgtccactatatgacagaggaaagactatgactgctgttgaagcaacgcccataaccaaggaagaacaaagcaagccgttgacacttcgtgtcggagcggaacttgtgggaagcttcatcatttgcttcgcgatttatgcgatctgctcgcttggttccgcggtgtatggcattaacatggcgttcatcgccctgttgacgggcatcgtatacgccgccgtcaccgtaatcttcggttccatttccggagcacagttcaatccggccgtatccgtcgccgccatgctcactggcaaaacccacgtgcttgatggcattctgtacatcattgcccaagtgctcggcggtatcggcgcgggtgccgctatccggttccttctgccgacttccgagcaggtgacattcaagatctggatgacaccaacggtcaacggtttcgataagaattccgtctcctactccaccctcggcaattatggagtgaccctcggcatcactctggccatcgccgttgaagtcgtcgcaggtatcattatcgttgcctccgcactgcgcaccacggacggacacggcgagtccaaaacaaaccacgccgttgccatgggccttgcctacggcatcggcaccgctatcacctatccggtgaccggagccgcactgaatccggcacgtgccacgggcattgccattttcgcacagaatcaaggactgaatgaagagccgctgcaacagctgtgggtcttctggatttgccctgttcttgccgctgcagttgttgctctcgtcgtcatcgtcgccggcatgattggtacgaagaagaacgtgccggatactgtcgagacaatcgataaggtcgaaggcaataccgttcttggcgaagcgtcagttgccgacgggaacgatggtgagcaggatgaacagtcctacgcccaagccaatgccgatgaaagcgtcgaaagcaactgaccgaaccttccatggactgcgctcacgcaatgccagtctgaccagtccagtcgctatggccgtcaccgcaatcgcagcggtggcggcttttgtatatcctgcgaccgcaagcaccgtcgcaacaatcactaccgcggcgacgatccattcgaaccacggtttgccctcatgatcttcggaaacgtaaggatggctcattccggggcctttcatcttgcttgctgtacaacaaccgtaatcataataaaacgtggcgtccgaaaccaatacggaatcggacgccacgttgaccaatacccctcacatgagaggcggcgtatcagtggaagaagtgacgggtgccggtcacatacatggtgacgccggccttacgagccgcttcgaacacttcctcgtcgcgaatggaaccgcccggctgaacgatagccttaacgcctgcattgatgagaatttccgcaccatccgcgaatgggaagaacgcgtcggatgcagcgacagcgcccttggtgcggtttgcgccatcagccagcgtgttggcgcgttcgacggacaggttcgcggaatcgacacgattcacctgacccatgccaatgccaacagtggcctgatcgtgggcgatcaggatagcgttcgacttgacacagcggatggcccgccaagcgaaaaccagatccttgacggtctgctcatcagcaggctcgccggaaaccagtttccaagcgttcggatcgtcgcccggagcatcgataagatccgtggactgcaccaacagaccgccgtcgatctgacggaactgcgtcttggacttcggcggctcggaaaccttcagaatgcgtaggttctttttcttggtctgcagcagttcgagagcgtcggcatcatagtcgggagcaacaatcacctcggtgaaaatcgggcggacgctttccgccatttccatggtgaccttgctgttcgcggcgatcacaccgccataggcgctcatcggatcacaggcatgtgccttcttgtgcgcttccgcaacagtggcgccaacggcgaggccgcacggattgttgtgcttgaccacggcgacggcaatctggggagcaaaatcccatacggcacgccaagcagcatcagcatcaacatagttgttgtagctcatcggcttgccaccgagctgttcggcatgcgcgaaaccatcctggttcagcggatccagatacagcgcggcctgctggtggggattctcaccgtaacgcagcacgtgggcacggtcccaagtacgagtgaatgcggccgggaacttggtctcattcacttccggctcgtcttcggcggttggctgctcaacggtcaaaggcttcggccagtgctttgcagtccactcgttaatggtggcatcgtaggcggcagtatgggcgaacgccttgccggccagccaacgacgttctttgagagagaagccctctccgttttcgatgcgcgcagctaccagtgcgtaatcgttcggatcggtgatgatggccacagtggcgctgttcttggccgcaccgcgaaccatggacggaccaccgatgtcgatcttctcgatggtggcagcctcatccgcgccagaacgaaccgtatcggcgaatggatacaggttgacgaccaccagatcgaacggcttgatgccgaacttttccagctgtgccgcgtggtcctcattggtcatgtcagcgagaatgcccgcgtggatatgcgggtcgagggttttgacgcgaccgtcaaggcactccggaaagccggttacttccgagacttccgtcaccttgacgccaagttccgcaagacgcttcgcagtggaaccagtggaaaccacttcagtgccggccttgatgaacgcttcggcaagaacctcgatgccttccttatggaagaccgataccagagctcgccgtatcggtcgattcgttgttgtcaccctgatcctccttgttattgatggttgaggtcactgtgcgggccgcattggcgacctcacgattatctgattcaagagccgcagtggacgcaccactcctgctctcgcggacacgctttactatccagcgtattccaaaaaacatggatacggccaccaaagtcagcagccatgacgaaaacagtcccacggcagtaggctgtccaatcttacgggtcgatgaaatcacgtcgacgccgatgtgcgcaagatgttttgagcccaacgctccactggagatggcaaaaagcagactcgaacataccgatacaacggtgcaggaaatgcagaacgctcccgctggataggcaaagccaagcactaccctcttgacatcaatctgctgatcggagttgcctactctgatatgaaagcccttgttgaacagcatgaccaccatgcccgcggcacaagctaaagccaaaggaacgcacatcaacgcgatccgaatccaattcgtttcaatcgcttgaggaagcaaaccgaatatcggcagagacggcaatgccgacccctgaccgctccacatggtgaattccgctagatcgccaatcgaaaaaccggccccgaatacccaggaaatagcccaaatcgcgatatttggaatccaagcgatcatggcgatcgtggtgaggatgcgagaaccgttctgcattcccgatagctcatacaacttcaccatggccgactggttgctgaatgcccagtacaagaccacaatcagtccaatgaccagatagaccgtgatcaacagcacacccaaggcaacaccaatggtgacggttttacggaccggagacgaaacatgctcgctgatccaatccaaatctcgtttggtcagtggtgattcgggaatcgcggcaatggcatagccaagtacaaagacgatcgctgttttcacagcaaccacgcccgtcgtatcaacgagtttgatgtcaaggctattggcgaagaacacattgatcaacacccagcctatggttcctgccacgcatccggacagactcgttccgacgcgtttggcgagcgatgcgataagagcgatcagcaaaaccgtaagcagcaacggcataatcgtcaaagtgatggatccggttttgaaaccgttcccttggctgagaagcacaaccgcctcggtcaaggaaacagagaaggcggagagattgtcgccgccttcttccatggaaataaccagaagcatcagcgcaatgtagcagcctagggcaccggcatagacgaccatggacaatgccgccacggcaagccccttcaaccaatacttcaggttcgccatcatatcgacttggaagcgagcacctcgcgcatgatttcagcggtctgccccggagtgcgtccgacacgaatacccacggcttcgagcgcttccttcttatcttgcgcagttcccttgcctccggaaacgatggcaccagcgtggcccatctgcttgccttccggcgcggtgaagcctgcaatataggcgacaaccggcttggtcatatgctcggatgcccacttggccgcatcctgttcggcactaccgccgatttcaccgatcatcacgacagccttggtggcatcatcgttttcgaacgcctcaagcgcctcctgcaacgtagtgccgacgatagggtctccgccagcacccaaacatgcggtaaaaccaatgtcagacaactctcccatcagttgataggtgagcgtaccggacttagacaccaaacccaaaggtccacgggagacgatgccgtccggaataatgccaagattgcaaccattcacaccttccgtagaaggcagggtaagcagaccagggcagttcggaccgacaatacgcacatccttgcgcaatgcgagttcaacaaagtacgcgctatcggcaacaggaatgccttcggtgatgacaacaatcagcttgatgccggcttcaatggcttcgaccacggcatccttggcgaaacgcggcggcacgaacacgacgctcgcttgggcgccggtgacttccacggcttcggcgcaattgccgaacacacgcaacgtaacatcctcgccgtctttggccgcggggaaattgacttcctggccggccttgcgggcgttgacgccgccgacgatattggtgccggccttcagcatgcgggcggtatgggtcatgccctgatgtccggtcataccctgcacgatgacaggtgcgccatcctcaatgaaaagcgtcatttcagcgaacctccttgccattggccgcaagacgcgcggcctgctgtgcggcttcttccatggtctgtgcaacatgcagattgacacgatcggcctgagccagaatatgtagaccttctgccgccgcgttgccgtcgaaacggactaccagaggcttggaactgccaagcttgtcaagggcttccagaatgcccttggcaacttgctcgcaggatgtgatgccaccgtacacgttgatcaacaccgattcgacttgcgggtcggacagcacgatctccaaactgccgcacatcacttcggcggacgcaccaccaccgatatcaaggaagtttgccggtttgacattggtgccctgatcttctccagctccggaaaccgcgtcaagtgagctcatcaccaaaccagcaccgttgccaatgacaccgacggaaccctgaaggtgcacatagtgcagaccatgctctcgcgccttctgctcaaacggatccacatgcactgggtcagcgaagcgcttccagccatcatgacggaacgcagcattgtcatctaaagaaatcttggcgtccagggcgcacaatgtcttggaagactcgtcatccggatcgccgatcttggcaagcggattgatttccacaagcgtggcgtcgttctctttgaagcactgccacatcttcagcagaatctgtgctgcctggttgacgtcggcatgatagaagccaatgctttccgccatcttggtcgcagcctcgatatcgaaatcctccagagcgtcgatatgcagacgcttcacagattccgggtgttccttggcgatctcctcgacctcggttccaccattcgcagtagcgagcacgtcaaaatcgcgagacgaacgatccacggaaatagagacataatactcgtgaagaatgttctttgcctcggccaccaacacgccgctgaccttgtgcttgtgaatggtcatcggcaggatgtcttcggatgcaagaatggcctcatcacgattcttcgccagcttgacgccaccagcctgaccgcggtggccaatcttcacctgagccttaatcacgttggggtagccaatctgctcggcagcctcagccacttcgtgagagttctgcgcgaacactgccttaggcgttggaataccctgctcttcaagcagttccctagcctggtactcatagagatccatggattcttttcccttgatgctattggttatttacgaagaatgtacttaactcacgcaggcatggtgatcagtgaacttgtcgggcagtctcccagcgatgccatgccaccaatgccgacaagctccatgacgaagctgaaacctgccaccgtgccgccacacttttcgatcaacgaagcagccgcacgcgctgttcctccagtggcaatcagatcatcaacgacaagcacacgagatccctcatgcacgatattcgtctcgatttcgacggtggcctgcccatattcaaggtcatagctttcgctaacggtttccggaggaagcttgccagccttgcgcactgcgatgaagcccttgcccaggcgcgctgccaacgcaggaccaaaaaggaatccgcgggcttccaaacctgcgatgatatcgaattcatcggcagcgaccggcaacgcggcttcgagtgcgtcaagtagcaatccgaaggcacgcgcatctgccagaacaggcatgaaatcacgaaaaagaataccttccttggggaatcccggaatggtgcgaatctttgaaacaaggtactcggcgttttcgtttccaatcttgctaagaccggaaacggtaatatccgacgatgccatgactgtattgtccttcttttgtagtgctacggcactttgcattataggtttccgtcaggaataaaatcggcgaaaacctcaaaaatgagattttcgccgatgccttaatgagcttgtcagctgttcttctgctcggtctcagtctgcgccgcttcgatttcgccttcaatcggctcctgagcagcctgatcttcgtctgtggaatcggtggaaagaggattaccgttttcatcgacctcatcgtcgtgtacgtacgcaggacgcacgtattcgcggctgatggcgttgaaaccgaaacgaatctgagagccttcggaatcgatgacgatctcctcgtattcggtatcgacggaaacaaccttgccgatcacaccaccaatggtgatgacctcagtgcccggctgcaggttggcacggaaatcctgacgctcggcctgctgctgcttagccttcttggactgccagaacatcatgccaaacatgacgacaatgatgacgataagaaacatgtgatccaaagcacaactccttgggatggacgctcgaacaggactctatgtccagaacaccgagtctaagctagcttgctgacatcaacctgagattcgtcagaagtcaagccgagatgatcccatgccttgcgcgtcgccacacgccctttcggggtgcgcacaaggaatccttctcggaccagatacggctcgcacaccgtttccacggtctccgattcctcaccgaccatggccgacaggttgttcagaccgaccggaccgccgttgaaattggtgacaatggctttcaataccgcaatatccaaacgatccaagccctcggtatcaatctggtacagtgccaacgcctccttgacatcgtccggatgcacagtttctaaatcgtgcacaatggcccaatcccttacgcggcgaagcaatcggttggcgatacgcggcgtgccccttgaacgcatggcaagctgatgggccgctccctcttcgagactgatgcccagcaccgaagaggatcgttcgatgagcttttcaagctcctcatgcggataaaagtcaagatgcgcggtaaaaccaaaacgagccctcaacggtgatggcagcatgccttcgcgagtggtggcgccaatcaccgtgaatctcggcaaagtaaggggaatggaggaagcacccggccctttgcccaccatcacatcaacacggaaatcctccatggcgatatacagcagctcctcggccgctcgtggaaggcggtggatctcgtcgatgaacagcacctcccctgcgtcaagggagcttagaatcgaggccaaatcaccagcatgctggatagcaggtccggaagtgactcgaatcggcactccaagctcgttggctacaatcatggccaacgtggtttttcccaagcccggaggccccgccagcaggatgtggtcagggggaacgtcacgtttacgggcagcatccaaaaacagctgcaattgcgccttgagtcttggctgtccaataaaaccatcgaggacgtgaggacgcagttcctcatcgcttaccggctcgttgccgacaggcgacgcggaaaccatgcgaagcgattcctcattggcaccggtattcgactgttcgaatgcgacgtcgttcgtcatgatgatgcgtttcacctacctcggtcaagagaagccaatgcaagtttgagcacgcggggcacatcatcgtccctcaatggaacattgatatgattgctctcgcagactgtctgcacggcatgcaaggcatcctgctgacgccaccctagtgacatcagaccttccacgacctgttccgaaccggcatcttccgcagaacgaacctctttggaagccccctcgatctgactgagatcgatggaccccttgagttcgagaataatcttctgcgcacccttcttgcctagaccaggcgccttcgccagcgcggtggcatccccgtccgccacagctttcgccaaacgttccggaggcaacgtcgaaagcaaggaaagcgcgactttcggaccaattccgctgaccttctgtaattgcaaaaacatgcgtttcgaagcaagcgaggaaaacccatacaatgtaatcgcatcctgcgaaacattcaatgacgtgtataccttcaccgtctgcccagcgtgcatggacgccaaatccgccgaaggcatacgggtctcatatcccactcccccgacctcaataatcgccgaagcggcgtcaatgaaatcgacctggccatgcaacatgcctatcatgccgtcacctcccgcatacaactgtagaacatctgttcgatagtctacattcccctacggacgccgcgttgtcgcgccgccttctgtgaggccagagcccattgacgctgtgcatcggtcaagtgttgttcacgctctcccccctgtaacgcgcctgcggggcgaagcgcatgacaaatcgctatagccaacgcatcggcggcatcggcgggcttaggcaaggtattgagccccagaatacgggcgaccatgcgttccatctgaatcttttcggccttgccgttgccggtaatcgccatttttgattcagtgggcgtatgcaaggcgacgggaatgcccctctgggccgcagccagcatggccagtccggcggcctgtgcagtccccagtacggtgttgcgattctcctgtgcaaacacacgctcgatggacaccgtatccggtgcgaaccgttcgatcttttccaccaaaccgttatagatggctaacagacgtaagtcctgcgacattttcggatcggaacgtaccacgtccacatgaataaaagaaagccggcggtatgcgccggcttcgatcacgccgaccccgcagcgagtcagcccggggtcgacgccaagaataatcacgcttgattactcctcgtcaagctgagccatgacctcgtcagaggcggtccagttggagtagatgttctgcacgtcgtccagatcatcgaggttgtcgatcagcttggacaccttctgggcatcttcgagagtcaattcgacctcgttcttcggcatcatgaccagatcagcggaatcataatcgaatccagcgtcctgaagggccttacgaacgtcgatcatctcggacggaccggtgacgacagtgaacacgtcgccgtcgtccgtaacatcttcagcgccagcttctgcggccttctcaaacagatcatcaaaatcgacgccctcggccggaacgatgatctggcccttgcgctcgaagttgaagctcacggaaccggaggtagccaaagagccattgcccttggtcagggtggaacgcacttcggcggccgcacggttacggttatcggtaaggcattcaatgatcagaccgacgcctgcgggagcgtaaccctcatagacgatatcttcatagttggcaccgccggcttcttcaccagagccacgcttaactgcgcgcttgatgttatcggcaggcatggaagccttcttggccttgtagatggcgtcgtacagggacgggttgccgtcaggatcgccaccacccatacgtgctgcgatctcgatgttcttgatcagcttggcgaacagcttgccacgctttgcgtcgatggcggccttcttgtgcttggtggtcgcccacttggaatgacctgacataatgctcctaggcaggttgcggatgtttcaaacgaaacgattctaaagcggttctaagacaaagcgcccgacatacgtatgtcaggcgcgtcaacggccgtttcatgcagccggttcacaactgatacgtcttatgaccgacggccatctggcaacgagcctcaagaatgcgttggaatacggtaatgagtcccaaaaccgcaagcaataccatggcgatggccagccataacccttggtgcgtgagcccggtaatcgccatgcccaccagaatgatgaccaatctgtcggcacgcgttgcaatgccgtttttcacttcgaaaccgacggattcggcacgggcgcgcgcatacgacgtcacgaacgacgtcatcatcgacaccatggctgcggcgataccaatccaactaatgcaatccgggcttgaccggttgatgtcataccaccaatcggcatgcaggatgaagaagatgaccactccggcaagcaatgcccaatcagcgatacggtccaatgtggaatccaaaaaagcaccgaattgggtgcctcccgtggtcagtgccgcaattgagccatccagggaatcggcgagcaccagcaacgtcagcaccaccgctccggcgaacaaccatcccgtaatgccagtggcgaaagccaccacaatggttccaatagcgccaataaccgtcaccgcattcgctgtcaggccaagggataccagtgccttggcgaatggctcgataagtcttttgaatggtgcacggagatgttctaacatgcgaattcctgttcttcggaaagcaaaagggcgtgcaagcgtcagtatgtgatgcttgcacgcccccataattcataaccgtatgcgaccgaacgtgaacgaatcagatcagtctgcgatggcggccttgaaatcgtcgacgttgttgacctgaacgcgcttcttcagcacggtcatgatctgcgccttggcctcatcgaccggcacaccgttgagctggctgccgtcacggaagcggaagcttaccgcgttgttgttcatgtcttcctcgccgacgatgaggatgaacggcaccttcgacttggaagcgttacggatcttcttgccgaaacgatcatcggacatgtcgatttcgcaacgaaccgtctcctcttccaagctggcaatgaactgctgcaggtgtggggcgaattcgtcggcaacgggcacgccaagcacctggacaggagcgagccacgccgggaaagcaccggcataatgctccagcaacacggcgaagaaacgctcaatggagccgaacagtgcacggtgaatcatcaccggacgctggtgggtgccatcggcagcgatgtactccaagccgaaacgttccggaaggttgaagtcaagctggatggtggacacctgccacgtacggccgatggcatcgcgagcctgcacggagatcttcggaccatagaaggctgcgccgcatggatcgtcaaccagttcaagtccggattccttggcgacttcagccaacgtattggtggcctcttcccagatttcgtcggagccgacgtacttgtgcggatccttggtggacagctccagatagaagtcgtccaaaccaaagtccttcaacagaccaagcacgaaggtcagcaggttcttcagctcgtccttcatctgctcgcgggtgcagtagatgtgggaatcgtcttgagtcaagccgcgcacacgggtcagaccatgcacttcgccggacttttcgtagcggtacaccgtgccgaattcaaacagacgcaacggcaactcacggtaggaacgctgacgggatttgaagatcagattgtgcatcgggcagttcatcggcttcaggtagtagtcgaagccctgcttgacgacgttgccgttctcatccttttcctcgtccaaacgcattgccggatacatgccatccttgtaccaatgcaggtggccggaagtctcatacagaccgcccttggtgatgtgcggagtctgcacgaagctgtagtggtgcttgcgatgcatttcgcgggagtaatcctccatcgcgttgatcacagcggcgcccttcggatggaacacagccaagcccggaccgatctcgtccgggaaggagaacagatccatttccgcgccgagcttgcggtggtcacgcttggcggcctcctcaaggcgggtttgatatgccttgaggtcctccttagtggcgaaagccgcgccatagatgcgctgcagcatcggattggcttcgcttccgcgccagtatgcggctgcagaacgctcgatcttgaacgccttgatatagcgagtgttcggcaggtgcggtccgcggcacagatccttccacaccacattgccgtcacggtcgacgttgtcgtagaagctcagttccttgccgctgatttcggtggcggcttctggatcgaggtgggcttccttgtctttgatgagttcaatcttgtacggctgatcggactcttctgccagagcctcctcttcggtcaccacgcggcggcggaaggactgggaggacttgataatgcgctgcatgcgcttttcgatctctttaagatcgtcaggagtgaacggagtctcgacatcgaaatcgtaatagaaaccgtctttgatgaccgggccgacgccgagcttggcatcaggacggatctcctgaacggcctgtgccataacgtgggttgcggagtgacgcatgatggccaggccatcttcgctgtccaatgcaatcggttccacgacgtcgccgtcgtgcagttcggtatacaggtcgcggggttcgccgttaagacgcactgcgatgatattcttgtcttccgcgaagagctggacgccagtctgatctgctgccacctccttcgcttcgccgttgagtgtaatggagatggtctgttcagccatgagttgtcctttgctatcggggtccgcggtactaatgtgcaggcctggactgtatgtcaacgatgaacaagatagggttgagtgcagacatcggcacgctgaaagagtgaacagcatgctacagcgcgattatattttaacggatcgtatttgatgctattcgacgacatgcgcgtacgtgtattgtggcgcgcttcgtgtcgacgtgatctccaccttatcggatggcacgatcgacacggtggctccgtatttcactttcaaacgtgaaccgacgcctccagcgagattgaccgcgttctgcagattgtcgctgtctccaatcgccctgatgatgaacggcgccttgatattcgtaccgtcgcaatcgagaccgtccgccgtatcgctgatgtatgtactggtaatcacgcgaatatcgttgatttcaatgacttccgcgccgctattgcgtagttcctcaagtagggtgaataaaatcgacgcgtcaatatctcgctttgatcctttagaaatacggatgaccacgccttcgccggatactggtaaacgcccggaaagaatgccattcgattcagcgttctgcctggcgatttccgctgccttctcgttcttgtcggcggtatccttcagagagtcaagctgattggatagttcgcttttacgctgttcgagcttttgcacctgcgtactcgtttcgctaataagcttggtcagctcgtcctcgctcatcgtctcatatgtggaggtcgtgttgttcagctggatagcgtagctgaagcccagcaacgcgcaaagcacggttacgagcacgcttgaatacaggcgcgcgcgagtggccttcgcattcagcgaaaccctcttcggtttgcgcctgaccacaggaaacgatccggtttgggtgctgtcgttgttttggtctttgacgatctgctcgtggatcttggagagtacatccttgttggcatcgttgcgtctgctcatacgccgtcatcccttgaagatgaaacgtcggatggatgacacattggtgaagattcgaatgccgagcacgacgatgaccgcagtctgcagctgggaaccgacgccaagctggttgcctaggaaaaccaacaatgttgccgtaataacattcgagaagaaggaaatcacgaagaccttatcggaaaagctacgctgaaaataggctcgggcggcaccgagcagcgcatcgagcgccgccagcaccataatcggcagatacggctgaagcgcaatgggaatgtccggccggacgaacacgccaatgaccacgcctatgataagtcccaagaccgctgccattacttgaccttccttgcatatgtcacttcgccggtcaccgccgcttccagcgtaatcgatttgcttctgctcacctgcggatagataccggcttctttgaaatcatcgtacaaacgtttttgcgttttcttgctcaccgcattggcaagcgcactggaattgccgatcgcctcgatgcgataggggctttgcacggaattgacgccgataaggatcgtcgtccctgccgttcgtatggaagtctgcacaccgagacgatacccgttaatggcgatcgcctccgcaccggactgccaaagcagcgagacaagcacctgcagatcggaatccgtgaccacacggacttggctgccgttttcccttggcagtgacgaatccgcgttgtctccgctcaccgatattggattggcgatggtgagcgtgatgccttcgccttgcacaggaagtacgccattgaccatttcgtcatcctgtatggtctggttcagagaccagttcgacacggatttcgattcctcctcaacccgggctcgcagcgcgttcacgtctttggtgagggtttcgacgtttttcgtttgatcagataactgacttgacagttgcttgcgtacttccttacgtggatcggtactcagctgtcggacgaacacgcttcccgccgtgcctacggcaatgcagataaggaataccaaaacccgggtgaaccagaccgaaaacaatgacggagttttggtggccaacctcgagtccgtgtacatcacgtccatcggacgattggtcaaatcgtcaataagccgcaatgagtcatcatccagattccgccttctgcgcgaagtggatgtcacgatatcaggctgcacatgatgcgaagtcagcccggcgaaggacgccgagaaaacggcgcgccgcttcgtaggcgtattctccggagacaccgggaacgacgcacgttccggagcatcatgcatcatgtgagtcaatccttatcgttcttcagaagctggattccctgacgtatgtaaatatagccggcaagccagtacaatcccacaccccatatgccggtggcgagaccacacaaatgcaaagtatccgtagccgaattagaccagatatctgcgaaaatcaaggcgacaatggcaatcatcagcatggcggtgcctgcttttccaacgaaatgcaccggcagcggaccgtaatcacgctgcgccaaaaccagtacaagaatcgccatgatcaaatctcgcaatccgacgacgatcagcatccaccatggaatgatgccagcgactccaagcgcgagaatactgcagaaaatcaataatctgtctgcaataggatcgaggatctgcccgattttgctcacctgattgaacgagcgtgcaatcagaccatccaagccatcggacaccgccgacagcgcaagcacaatcaatgcaagcaccatctcatggcgagagaccaataccgagatgaagggaatcgaaatgattcgcaacaggctgataaggttcggaaccgtgaaatagatatcccgcggttccggactgtactgttttttgataatcagtttgctcatacttcgagcaatattacattctcgaggcctgcaaagcggtgacgattatgccacgagcaccaacttcatacaactggtccatgagttggttgaccttggccttcggcacaacgacacgcacggccgcccactgcttgtcatgaagcggggaaaccgtcgggctttcgaatccaggcgtgatgtccacagccgcggaaaccttctcgactggaatatcgtaatccatgagcacgtaacgctgagcagtgagcacgccctgcagacgacggctaagaatcgtcaaacgatcatcatcttcagcaagacgcggggaacgaatgagcacagcttcagaatgcaacagcggttccgcgaaaatacgcaggccggcgttacggagcgtggtgcccgtggataccacgtcggcgatcaaatcagccacaccgagttgcactgacgattcgacggcaccatcaaggtgtacggtttcagcgttgatgccatgctcagccagataatcatgcacaagcttgtcgaaactggtggcgacgcgcttgccttcgatatcttcgagcttgctaatcggagaatcattgggggctgcaaaacggaacgttgaagcgccaaagccaagctccatatgctccttggcatccgtaccggagttgagcagcagatcatgaccggtaatgccgacgtcgatggtgcctcggccaacgtagacagcgatatcgagcggacgcaggtagaacagctccacgtcattgtcgggatcctccacaaccagctgacgcggattgctcctcaggcgatagccggcctcggccagcatgttccatgcaggttcggacagcatgcccttgttgggcacggcgattctcagcattttccctcccaaaaaggccacgcctcctatggcacggccaaaaactcacagattcttgtagatgtcttcgagtgtgatgcctcggtcgatcatcatgacctgcagatggtagatgagctggctcatctcttccgcagtacgatcggcgccttcgtactcagctgcgatccaggtttcgcccgcctcttcgacaatcttcttgccgatgaaatgcgtgcccttgcccagttcgtcaacagtcaacgagccagcctgcttggctgcggccttctcgctcaattcagcaaagagagattcaaaagtcttcattattcgtatctatcctcgaaatattggtaggttcaggccttgaatgcggcttcagccttctcacggatggaatcaatggcttccgcaggatcctcggcaccatacacggcggaacctgcgaccagtacgtcggcaccggcctcggctacaatgtgcgcggtcttcgggctgacaccgccatcgacctgaatcttggtggcgaggccgcgacgggtaatctcgtcacgcagacgacgtaccttggccatctggttgtcaaggaacttctggccaccgaagccgggctcgacggtcatgataagaatcatgtcgaattcgtcgagaatatcgaaaatcggctcgacaggttcggccggacgcaccgcgaagcaagccttgcaacccatctcgcgcagctggcgcgccagacgcaccggagcgtgggttgcccccatgtggaagcttacggatgcagcgcccaacttggcatattcgggtgcccaacgatccgggtcctcgatcatcagatgcacgtcgaccggaagatcggtgacttcgcagatacgagccacaatcggctcgcccaaggtcagattcggaacgaaatgatgatccatcacgtcgacgtgaacgagatctgcattggagatggccttgaggtcgcgctcaaggttgcagaaatcagcggacaggatgcttggtgcgatttgaatagtcatggctcttattctatgaaaggtaatcgacttgctgttatttgatgccgggctgcttgtcggtattcgagacagtttcggcatcgttggttttgatttcatcaaccgtttgctcggggaaagacaccacggaatccgaagaatcctccgattcaccgttttcaagacgctgctcgatttcggtgacggtacgaagcttctccgccaacaggtcagtgtctttgcccatttgctgcacgacgatgaatgacaccgcgccgagcacgaacaccgccatggagacccacacattgatgcgcacgcccaagaattcgtgcgcataatcgatacgcagggattcaatccaagtgcgtcccagggtgtaccacatgatgtacacggcaaacagggaacctgccttgagtttcttcatggctttggaaccgatgtatacgataatcgcggcgccgatgaggttccagatcatctcgtacaagaacgtcggatggaacagcgtgccactcgggcatgtggctccgtcatagcactgttcgctatgcccgatggcagtgccttccatgttgagtttcaaaccccatggaagcgttgtcggagcgccatacagttcctggttgaaccagttgcccaagcgcccaacagcctgcgctaccaacaggcccggagcgatggcgtcagccagcaaggccattggatagtgcttatgacggcaccatgcccatgcggccagcgctccgaacagcacgccgccccagatgccaagtccgccattccaaatgcggaacatttccgcccagtcgccatccggtccgaagaaacgttcaggcgtggtgatgatgtgataaagtcgtgcgccgataatgcccgcaggcacgctgaccagagtgatatcaagcacttggtcgaaattgccacccaactttttccaacgtgtggtggttatccatactgcaaggacgattcccatcaaaatgcacaacgcatagatatgaatcgttactggaccgatggaaaactgcgaaatcgttggcgatggaatgtatgcaagtgtcatggtttcctgatggtagtccacgcatccgatatggtgcgtggaccaccgaaatcgtcagaatggtttactttgcgacacgcgcgttatggacgccgtccgcaagctcttcggctttggcggccaacgccttgagacccgtggcctcatcgactgcgtttttcccggattcgtcaagcatggtgtgcaccaatgcggatccgacgatgacgccatcagcgtatgagccgactcgcgcgccttgttcggcggtggaaacgccgatgccaacgcagacgttcttcgcgccggcattgcgcgtgcgtgccaccaactcttccggagaagcatcgatggtggaacgttcgccagtgacgcccatacgggctgccgcatagacgaagccgcgagcgttgcctgccacgaccttcaaacggctgtcggtggagtccggggacacgaggaagattcggtcaagtccatgacggtccgaagcttcgatccattcacctgcctcgtctggaatgagatccggagtaatcaggccggcgccaccggcattttcaaaattgcgtgcgaaacgttccacgccgtaatggtagatgaggttccaatagctcatcaccagagggactcccccggcgttggccacggtttcgacggctttgaacacgttcgcgattttctcgccgttgtcaatggcgatctgcgaagccgcttggatgacgggaccatccataaccggatcggaatacggcagaccaatctcgacggcatcgacgccatgctcaaccatggtgcggaatgctttcaacgaatagtcagaatcagggaatccatatggaagataaccgatgaatgcaggcttgttcgccgctttgaattcatcgaacatggcttccgtcggactcggcttatggctgatgccgagaggctgcccggacggcgtggttactgttgcgttcgtcataatggatactccttctttcactcgccgtccgcgttattgccctgggctccattggcttcgagcgctttggcttgctcgtcggtcagataaccgaaccatttgccggcagtgttcatatccttgtccccacgaccggaaatgttgatgatcatgaccggatgctcatatcccttggccttgagatcctcagccgccttgtatgcgcctgcaacggcatgggaactttcgatcgccggaataatgccttcggtctcgcagagatccttgaaagcgctcatggcttcctcatcggtcgcccaagaataattgacacgtccgatttccttgagccatgcgtgctccgggcccacagaggcgtagtccaaaccagcggagatggaatacgtatcgagggtctggccttcggaattctcaagaagatagctcttggcaccttggaacatacccagttcaccggttcccggtgcgaagcgaatggcatggcgtccggattccggaccattgccgcctgcctcatagccgtacaggttcacgcgttcgtcatcaaggaacgcattcatgatgccgatggcattggaaccgccaccgacgcatgcacaaaccgcatccgggtgatcgataccataccaatcctgaagctgctgcttagcttcctcgccgatgatcttctggaaatcgcgcaccatagccgggaatggatgcggaccggcaacagtgcccagcaggtagtgagtgtcttttacattggtaacccagtcacgaagagcctcgttgatggcgtccttaaggatgtgatcgcccaaggtgacttccacgacttccgcaccaagcatgcgcatacgtgcaacgttcagggcctgacgacgcgcatcgatttggcccatgtagatacggcacttcagtccaagcatggcgcacaccgtagcggtggcgacaccgtgctgacctgcaccggtttcagcaatgacccgagtcttgcccatgcgcttgaccagcagggcctgaccgagtgcattgttgatcttgtgcgcgccagtgtggtttaaatcctcacgcttgaggaacacgcgggcgtcaagaccagtcttttccctcagacgctcggcaaagcgcggcgcatcggtcaacggtgacggacgaccgacatactgctggttcaatcgagccagttccttatgaaattccggatcagccttggcttcctcgtagacacgttcaagctcgtcaagcgctgtaatcagcgcttccggcacatagcgtccaccgaactgaccgaaatacggtccttcatgacttgccaacggggtttgttcggatgctttcactcttgctcctgcctttactagtcgctccacagcctgttcatggttggatgcggttgcgacaccttcgccaaccagcaccgcgtcggctccggcgcgggcataatcctcaagttccaccgatccgaacactccagattccgctacgcggatcacatcgtccggcaaatcggcggcaagctcgttgtatttgttcacatcgaccttgagatccttgagatttcgtgcattgatgccgatgactcgcgctccggcattgatcgcgcgctgaatctcctcgcgagtgtgcgtttcgaccagcaccgtcatattgaggctatgcgccagttcaagcaaagacttgagcttgtcgtcatccaacgcggcaacaatcagcagcaccaaatcggcgccatgcgcccgtgcctcccaaatctggtattccgtgacaatgaaatccttgcgcaacactggaattttcacggctgcacggaccttatcgaaatcatcaagcgatccaaggaatcgacgaccttcggtcagcacggaaatcgcgctggcacctcctttttcgtattccctggccaatgcggcaggatcaggaatgtcgctaaggtgccctttcgatggcgaagcccttttaatctccgcgatcaccggaatgccatccgcttttttcagccactgtcgcgcatcaataggggccggcgcttcgaatgtctgacgcttcacctcatcaagggaaatgttctgttcacgtgctcgttggtcttcgacagctcccgccaccagttcatcgagtacagacatggtgttcctttcagcattttactcgattggttagcttgatttgactcacaactggcgaagctgcgaggcgatctgcaccgcttcgacgctggcctcggccttgttgcgagtctcctgccactcactggccggcacggaatcaagtacgattccggctccggcctgcacgctcgcttcatggtcgcggatgaatgccgttcgaatggcgattgccatatcgaggttgcctgaaaaatcgaaatagccgacagtgccgccataaatgccacgatctgcgggctcaagctcgtcgatgatttcaatggcacgtggttttggcgcaccggaaagcgttccggctgggaatgccgacgtgaacacatcgaacgacgtcatgtcggggttaactcgcccggtaacggtcgaacagatgtgcgtaatgtggctgaatcgtttgatatccatcaaggatacgacttccacgctttccggaagacatacacggctcagatcattgcgggaaagatcaacgagcatgatgtgttcgctacgttcttttggatcggcaagcagatccttggcaagttgctcgtcttcctcaatagtggtgccacgaggcctcgaaccggcaatcgggaaggtcatggcatggccattgtccactttgatcagcgtttccgggctggatccaataacgttgaagtcacgcccctgcgcatcggtcaacgacatgaaatacatgtatgggctggggttgagcgtacgaagcacgcggtacacgtcgaatggatcggctggcgaatcaatgtcaagacgctgggaaatgaccacctggaacacgtcaccatcgatgatgtgctgcttggcgatttcaacggaacgctcataatcgctcttctccgtacggaaacgaagctcgggctggctaatggtctcatccaacacattgatgcgagcttcaccttcgacaggcgtggcggccttacgctgcatatcatccaatcgcgccaccgcctcgtcgtatgccgcatcggcacgggtggatcgatcgtctacgttcaccgcattggcgatcatccataccgatccggacacatggtcgaccacagcaatatccgtggccaatgccagaactgtttccggctgcctggtctcgttcggcgcctcggcacgcaaggtcggttcccaatggcgaatcgcatcccaaccgacggtaccgaccagaccactggtcaggttcggcagtccttcgacatgcggcgctttcagtgttttcagcgcagcatgcgcgacttccatcacatcgccttcggtaggcacgcctgcgggaacctgacccaaccaatcggccttgccgttgttggaacgcaactgagccatggaattcacaccgatgaagctgtatctgttccacgtgccgccaaattccgcggattcaagaatgaatgtgccggaacgtcctgcagcaaggcgttcatagaatccgacaggagtcaacgaatcagccagaagtcggcgcacaatcggaatcacacgatatccctgatcagccaattcgtggaattgttcgcgactcggccaggtggcgccccacttgagtgcttgtacgctgcattcactcatcgctggccctcctgttccttggtacggtatcctacgaccacgggcagttgcccgccttcttcgaagcaggatcgtttgccggtatggcaggccgctcccacttgatcgacttcaaccagaatggcatccccatcgcaatccagtgcgaaggacttcacatactgggcatgtccggaagtgtctcccttgcgccagtactcctgcctggacctcgaccagaacgtgacgcgaccagtcatcagggtgcgtcgtatggcttcgtcgttcatgtagccgaccatcagcacttctttggtgtcgaattgctggatgacggctgccaccagtcctttatcgtccctcttgagacgttctgcgattcgtgggtcaagaatagtgctgttgtcgtatgcttcgttggtcatgatggtgttattgatttgtttcttcgattattgattacgttattcgcctgttttgcggttttcggctttcatcgcacggtatagccggcggccttgatggcatccttgacttcgccgatggtgactttgccgtaatggaagatcgacgcggccaacacggcatccgctccggcttcgatcgccggggggaaatcggcagccttgcccgcacctccggaagcgatgatcggaatcttcacttccttacgcacggctttaatcatttccaagtcaaaaccctgttgggtaccatccgcgtccatggaattcagcaggatctcccccgcgcccaactcctgagcacgcttgacccaccagatagcgtcaatgccggtggatttgcggcctcccatggtggttacttcaaagcccgactgagtgtgtcgctcgccctgctcacggcgtgcatcgacggataatacgagcacttggttgccgaatcgttctgcgacacggccaatcagcgtcggatcattgatggccgcagtgttgactcctaccttgtcagctccgcaacgcagcagagaatccacatcttcaggggcacgtacgcctccacccacggtcaatgggatgaaaatctgttcggcagttcgactcaccacatcgaccatggtctgccgatgcgagctcgaagcggtcacatcgaggaaagtcagttcgtcggcaccctgacggtagtattccgcggcaagttcaaccggatcgccggcatcgcgaagattctcgaaatgcacgcccttgactactcgtcccgcatcaacatcaagacatggaatgactcggactgccagtgacatgctgttttactccttcgcgcataatcatgtgtgcaacgaatgcaagagtaaccgttttacgttacgcatgttcgtcggaagtccgagtagcggacagaacaagcatctttccttgaaatctaatcttgttccttagctgcgagctgcccgcatgcaccatcgatatcctgcccgcgcgtgtctcgcaacgtcgcagtaatgcctgctttatgaaggatatcaaggaactgctgttcatcctcaggcttcgaagcggtccatttcgatccttcgatgggattgagcggaatcggattgacatgagcccaattgtcaccataatggttcaatcgcttagcaagtaatttggcatgctcggcttgatcattgataccgcgcatcagagcatattcgatgcttacgcgacgtttcgaagccaagtaatagtcatgtgccgcatcaagcacctgcgtagtattgaaacgcttgttcattggaacgagctcgtctcgcaactcatcgctcggagcgtgcaaggacacggccaaacgcaccggaatgccttctgccgtgagtttcttgatacctggtaccacaccgaccgtggagacggtgatgttgcgtgccgaaatgccgaaaccttcaggtggcatggcgctgatttggcgtacagcgctcaatacggacttgtaattgcccataggttcgcccatgcccatgaacacgatgttgctcaggcgcccgagaccaccagcgacttcgccgtcgtgcatggctttcgcggccacacgaacctgttccagaatctcgcctgccgacatgtttctcgtcagacccaattgacctgtggcacagaacgggcagcccattccacagcctacctggctggaaatgcataaggtggtgcgggtgggataccgcatgagcacggactcaataagagaaccgtcgaacagacgccatagcgttttgatagtagtgccctcatcggccacttgacgggtcacttcggtaatgagcgttgggaaaaacgcctctgcggcttcggctcgtttcgctgcaggaaagtcagagaactcttcggcagcgacgtcgaaatgcccatagtaatgattggcaagctgcttgactctgaatttcggaagtccaagatccttggctttcgcgatacgttcgtcttcagtcatatcagcaaaatgcagcggcggcttgcctcgacgcgcatgatctttggaaagcacgtcgcggaaggcaccggtagtgcctcctggagtaataccggtttccggcaaatccttcgtggaattcacggagtcgctcatgcttgtgtttgcctttctcacattccagttgcccacagcagcacgcacacgaacggcgcgcacagcagaatggaatccacacgatccatcacgccaccgtgtcccttaagcaggtgtcccatgtccttgatgccgatatctcgcttcaacatggatgcgcacaaatcgccaaacgttccggcgatgccgatcatgaaaccggccacgacaggaacccaccagcgggaaatccacacatccgacccgtacgtgcagaacatcacggcaaaagatccgatcatggagaacagaatggaacctgcaagaccctcccacgatttcttcggcgaaatgcgggggcttagcttgtgcttgcccagccatgccccggcgaacaaaccaccggtatcgctcaacgcgggcatgaataccatcataatagcatgcgcgacgggatgatcattgaatgtcaacggcatgatgaggcaggaagccagaagcggaatgtacagcacggtgaacatggagaccgcgacatggctcagcctgctatggcttacctctccctgctcatggttgaaggaggattcaagtcttgcgcctgcatcggtgtgggaaagcttatccgccacggccagagagatgcggctgccgaacgtcactttagcgctggcggcgatcgctacgaccaccaaagacaccagcacgcataccgtcatggcgacgatatgacgttcgctgtaataggtggacagcaacgtcgccgccgaacatacccacaacaccgccacgggaatatgaagtcccgcagtggcgaaatcgacgcgcagctcccaaagggcaagcaccatgaacagcacaaccagatagacgaacaagtcaatgctgatcagcagacacgccaagatgaggatgacgagcaccgcccctgtggcgatggcctgcggcatattacgccccgtcttcttgttgatggcgttgatggcctcttcggtttctttttcgagctgttcctgatgttccatcatgttccctgtctggctgtgcgtcgattcttttcaggagatgaaggtctctcagacctccatgatctccttctgcttggcttcgagcagggtatcaagttcatcagtggtctgcttggtgatcttgtcgagctccttgagcagacgatcgccctcgtcctcacccatctcgccgtccttgatggccttgtcaagggattccttggccttgcgtcggatgttgcgcactgcgaccttgccatcttccgccttgcccttggcgagtttgacatattccttgcgacgttcctcggtcagctccggcatggtcaggcgaatgacgttgccgtcgcgacgcgggctggcgcccagatcggaatcacgcaacgccttctcgacggcattggcctgggacgcgtcaaacggagtgacggacagggtacgcggttccggcacgccgatggtggcgacggccttcagcggggtcggagctccataataatcaacggtgataccgttgagcagcgccggattcgcgcggccggtacgaatgccggagaagttctccttggtggattccacggacttggccatctgtgccttggcctgttcgacaatagttgccatttgtactccttgttgttggttgtttgatcgatattcgacgttgaatgtcgttattcagcgagtgtggactccgcggtggaaaccatagttccgatttcctcaccgagaagggcgcgggtcacattgccattgccttcgagcccgaaaacacggatgcgctgcttgttgtcgcgggccatggaaagcgcggatgcatccataacggcgagattgtcgacgagggcacgattatagctcaatgtggcgaaacgcttggcgttctcgtccttacgaggatcggcggtataaacgccgtccacgccgttcttgcccatcagcacctcatcgcaatggatttccaaagaacgctgaatggacacagtgtcagtggagaaatacggcataccggcaccagcgccgaaaatcacgacacggcccttctccagatgacgaatggccttgagcggaatgtacggctcggcgacctgacccatggtgatggcggtctgcacgcgcgtggcctgtccctcctgctccaagaagtcctgcagagcgaggcaattcatcaccgtgcccagcatgcccatataatcgccgcgggagcggtcgattccagcctgttgaagttccgcgccgcggaagaagttgccgcctccgacgacgatggcgacctgaacgccctgctgcaccgcgggaacgatttcctcagcgatacggcggatgacggacgtgtcaatgccgactttgccgccgccaaacgcctctccggatagtttgagcagcactctgcgtggattatcaccagtgttttcgccagtcatgaaaagcctttcttgcccgagaactcacgaaatttaccgctctcaagagtatcggcaaacacagacaccacaccgcaacgacacagcgtcgagaagaaaacaaagttggccatcaccctgtggatgatggccaacctcatggaatctctagcgtctaacgcacggattcaccattgaagccgaattcactcagcctcgcccttgccgacctcgacacgagcgaaagccacggctgcgccgccgacttccttgaacaggtcgccaacggtcttggacggatccttgacataggactgctcgagcaggacgttctccttgtagaaggcattgagacggccttccacgatcttcggaacgatcttctccggcttgccttcggccaaggacttctcggtggccacgcggcgctcggactcgaccacatcggccggaacgtcctcgcgggtcagccactgggcacccattgcggaaatctgcagagcggcttcgtgagccacagcagcgccggcctcatcggtggcgatcatggccacgatgctcggcggcatctcagcggacttcttgtgggcgtagatctcaacgtgtggaccctcgaccttggcgaactggccgaccttgacgtgctcaccgaacagagcggccgcctcttcgacggcttccttcacggtggcttcgccggaagcggctgccagcacttcgtccacagaagcggcctcggctttgacggcgtcttcgagcacgctgtcagcgaactccacgaacttcggagtcttggccacgaagtcggtctcggaattcagttcgacggcgtaaccggtctggccattggcggattccacgacctgggaggcgatggtgccttcctgagccttgcgaccttcgcgcttgccagcggcctggatgcccttggcgcggatgatttccttggcgcgagccacgtcaccctcagcctcggtcagagccttcttaacgtccatcatgccggcgccagtttcctcgcgcacctgcttgatcagagctgcagtgattgctgccattgatttgtctcctctgaaaaatagtgatgccccatatgatgggaggcacaacacctcccatcatagtggatattttcactcagccttggcttcagcttcggcttcggcttcagccggtgcatcggcggccggagcgccctcagtgaggagctccttctcccaagcggccatcggctgctcggtctcgccctcagccttagcggccttgccggaacgctccagcaggccttcggccactgcgtcagccatgaggctggtcagcagttcgatgccgcggatggcgtcatcgttggctgcgatcgggtactcgacggactccggatcagcgttggtgtcgacgatggcaacgaccggaatgcccagcttgtgagcttcctcaacggccaaagcttccttgttaacgtcaaccacgaacatggcggacggagtacggttcatgttgcggataccgcccagctgcttagccagcttgtccttctcgcgctcgagaagcagcagttccttcttggtcagaccggaaccacgcacgtcggtgaagtccatctcttcgagttccttgagacgggagacgcgcttggacacggtctggaagttggtcagcataccgccgagccaacgctcggaaacgtacggcatgttcacgcggacagcctgattggaaacggcttcctgagcctgcttcttggtgccgacgaacagcacggtgccgttgtgagcgacggtagccttgatgaagtcgtaggccttgtcgatcatgtcgagcgacttgaacaggttgatgatgtggatgccgttgcgctgggtgaggatgaactgcttcatcttcggattccaacgacgggtctggtggccgaagtgcaggcctgccttcagcatgtcgctcatattgatctgagccatggtattactacctctttctgtcggttcttgcctggtcatgcgttcctgcgtgcagccaaagccttgcggcgtcggccgaccgacacaggtcgtcgcgaacatgacgcgaattggttgtatgccggttgacaatattgggtggctcaggactttcacgacaaagcccttcgccggatggcacacaaggcataaaataccatggggtcacgtcttttcgcaaagacgtgaccccaagtcgtcatatcggtgagatgcgaacaatcacttgtggtgattgcgcatgtagcgcatcgcctctcggcgttcctctttctccaaacgatcaagatagacatgaccgttcaagtgatcggtttcatgctgcaacatgcggcccataatgccacgaccttccagcacgaccgtcttgccttccaaatcgatgccacgcacacgagcgtaatcggcgcgacgggtcttgtaccacaatcccggcacagacaggcatccctcatctccgtattgttcaccgcaggtctcttcgaggacagggttgagcacatacccgatcttgccgttgatgttataggaaaatgccctcagattcacgccaatctgattagctgacaagccagcccttcctggatcgtcaacggtatcaagcagatcctgtaccagatgacgcacggccggcgtaatttccttgataggatcacagggggtacgtagcaccggatcaggtacgactcgaatctcacgaattgccaagattatcgctcctcgttcatggttgtttcctcagtttccgatgagtcttccggcgtttggaactcgccggcgtcttcggtctgcttcttaattttctcctgcatggtatcaaatgcctgccgaaccttcggacttacggattcggaagcctgacgcatggattcggaagcctgcttgaccgtttcggtggttcggtcaagaatctgcaccgtctttggcagcggtttgttggatggcttcggcgcatacagcacattgtcgatgacattttcgtaccgcttaagcaccttcggcctgacaactttcaggctcgccgtcagagtgcccttctcctggctgaactcctcgtcgaggatttcgaacttgcgaacggattcagcacgagagacattcgcattcgccttttcgacatactgctgaatgaatgcgcgcacggcatcgttcttcgcgatctgctccatgggcatgttgctatcaagtccctgctgtgcaagccaggaacgaaccatctcctgatcaagctcaatcaaagctccgatgaacggcttgccatcaccgaccaccacaccatgcgacacgatcgggcaagtgttgatgacatcttccataggtgccggactgacgttcttaccgccggccgtaatgatgatatccttcttgcgacccgtaatgtacacgaatccgtcgtcgtcgatggttcccaaatcgccggtcttcagccagccatcagccatcctgacatcggctgtcagctccggcttcttgtagtagccaaggaacacgttggggcccatcacctgcagttcgccgtcgtcatcggtgcgcacgcccatgcccggcccgggcttgcctacggaaccgacgcggttggcgtcctgccagttgacaatcatgggagcggcggtttccgtcatgccatagccctgaatgaaggtaatgccatccataccgttgaagaaatgggcgagatcgacgttcaaaggagcgccgccacaagccagatatctcatgttcggacccaaagcagaacgaatggatttgcctacgacagacataaagaacgaatgttcggcacgagccacaatggaatggcgtccggtttcctgctcgtccttcgaccattgcacaaaatgatcgaaagccttggcgaacactcttccacgaatacccgctccggccttttgcgaagccgcgttatacactttctcgaacacacggggaactcccagcagataggtcggcttgaagctacgcagatcggcaagcagatgcttggctccgggcagatagccgaccaccccctgcccgccaatcgcaacatactgaatatagcgagcgaagcagtgcgccaacggcaggaacaacatcagacgattcggctgatatagcatttcatcgagaatgatgtagccgttcagcacgatatgcgtgaaattccggtgagacagcatcgctcccttgggcttgccagtggaaccagacgtgtacacaatggtgagcatgtcatcggccttgaccctggaaatcacctgatcgagcgtgtcctcgccgacaccttctccaaaatcagcaacggcatcaagaccatccgccttgaagttgaagacgtagcgcaggctgctgtgctcatcgcgaatctgttcaagcgtttgtgtatgcgcgaaatcaccggcaaaggcgatgatcggatccacctcttcgatgatggacgcggcctgcctggcggaatcggtttcatacacgggcacgcttaccgcgccgattgcggcgcaggcaaaatcgatgactccccattcgtagcaggtaggcgaatagatgactaccatgcttccggccttgacccctaggccaagaagacctttcgcaaccgcgcgcacacgctcaagcatctcccccgccgtaacgtcatgccatcgacgagtctcgtcgtcctgccattgggcgatgagatcatcaggatcacgtttagcgcgtctggagagcagtgcgaaaacggtatcctcatccgtagtgctatacgcaggttccggtacaaattctctcaacatgagtccctatagtagttgcagtatgctcaaggcacgctgaaaacccttgaaaacggctgaattcagccaattccaagggttttgaatggttacttgttatacgtcacacgccgaaatcagcgacttcgcacttccaagcagatcccttgaggacgcacttcaaattgctgcacagccttcgtcctccaatgcccatcagcacggtgctttcgaagcatgtcggagagaccaaccagctgtcaacgtaatatacggtgatcggaagcagacccaactgcgcgtatatcctcacatccttcttcatctgtgctgcgatctgagcggaggcatttctcagctttctcatgcaggcctcgctcaataccctttccacgcgtgcttctttctgcctgccacggaagatatcgacaacattgcagatcaactgcgccgcgaacatgttcatggagtaggcaaattcagcatcgcacggcccaggcattatctggatgtaatggaatggtattttcctgccgaaaagatctgaattaagaaacccatcatacgagggaagcgttttatcgtaatcgaaaaccggctttctgccaagctcaagagatatcctttcccactctgtcaggttttctccctcgcgtttcttcccacttttatcagcgcgcttcgcattggccgctgatccctggtcagaaggtggaacctccgagaagggctcgttagcctccggcggcggaacatcattttcacatgaatcatccatgatgaatccctttcttattcgcccgactcatcgttgagagggggtgtaagaaccattaaggcacaaaagccatcccccgtcaagttgacatttgattcttgtggataagtggataacttcagatatttcaaacactttagaacaccctaaagataaattttatacccctaaaacattacaaaaaaggtggcatatcgttgaaaaagcaaagagaatccttctttggcgaaaaaccctaagttcgtctcaaaaacgcttagtaaaaatgaacggcattagccttcactgaaagataatgatcatgtttgttcgtatatgctcacataaagttatgttaccgggcatacactcctctaagtgcgctcaagaaaaataaaaaaaaattggctctgcggcattcgccgcagagccgtctgagaatgggctcccccacctggactcgaaccaagacaaagggttccaaagacccgtgtgctgccattacaccatgggggaatggcggaaaaccttgcggttaccgccaagtgtctattatgccacatgtcgccaacaccgcgtgtctcgacgtgtcgcactaataaaaaacgttgtttaaggtgcacaaaaagtgttatgcgcaccttaaacaacggtactcgcttcactgatatgggagttaccccacaaacatgcggaacgtacgctaagcatgcccgcacaacgcgtcatcaggcgaacaagaagccctgtccgtgatgctccggatatgtgtcgaacaactcagccacagagccgtcttcgaacacagcacggatggcgctggccagcagcggcgcgatcgacagcacggtcaaaccgtcccaacgcttctcttcaggaatcggcacggtgtcggtaagcacgacttcgcgggctccgctgttcttcaaacgttcgacggcgggaccagacagcacgccatgtgtggcgacgacagtcaccgacttggcaccggcatccttaagcacgctgcatgcaccggcaatggttccggcggtatcgatgagatcgtcgacgagcacgcagtccttaccttcgacatcgcccacgactcggttggcgaccgcttggttcggacgggtgatgtcacgcgtcttgtggacgaatgcgagcggaccaccgccaagacgctgcgcccactgctccgcaacacgaatgcggcccgcatccggagagacgacggcaacattgtcaagctggttggagaaacggtcgcgaatgtagtcgaccagcaccggcatagcgataaggtggtcgacaggaccgtcgaagaagccttgggactgcgccgcatgcaggtcgacactcatgatgcggtcggcacctgcggtcttcagcaggtcgaacatgagacggcaggaaatgggctcgcggccgcgatgcttcttgtcttggcgcgagtagccaagcagtgggcagaccgcggtgatggaacgcgcggatgcacgcttgagcgcatcaatcatgatgagctgttccataatcgattggttgatcggggctgcgtggctttgcagtacgaacacgtccgcgccacgcacggattcggtgtagcgcacgtacatttcgccgttggcgaagtcgtatgctgtggtttccagaacatcaatgccaagttgttcggcgacttccgccgccagtttcggatgtgttctgcctgtgacaaggataaggtttttatccggctttccttcaaggattgcgctcaccatgtctccaaacgtctgttttcgcgtcaagtggacgtgacccatattaaccatctgcgcagaccgtctcacccgcgcgtgttcacctgaaatttaccggtacagtccgtgcttgccaatatattgcaccacgccgtccggtacgaggtaccaaacaggctccccatgctccgcacgtcgccgcacatcggtcgaggaaatcgccagtgccggtatttccaacgtatcgaccttgccttccggcagtttcaccccttccggcgatgagtacccggggcgggtcacggccacgaagtgggccagatcccacattttgtcggcgtctttccattgcatgatttccgcgaccgcgtcagctccggtgatgaagaagagttccgcgtcgggatgttgcgcacggatgtctcgcaacgtgtcgatggtataggtgactcccggacggtcgatgtccacgcgtgatacggtgaatttcggattggacgcggtggcgatgaccgtcatgagataccggtcttccgcgttggtgacgttcttgtcgagtttgaatacggggcgtcccgtcggcacgaagatcacttcgtcgaggtcgtacacccacgacacttctgaggccgccaccaagtggccgttgtggatggggtcgaacgtgccgcccatgatgccgatgcgaggcctgctatgccagttgccgcgtgctgaacgtcggcctgtggccaccgcggaacctgctgattccacggaaaggtcggacatgcgccgttccggttccaccacatagctgatggcaagttcggaatcggcttcggcggattcgggccgcatgcgtttcgggccggtcatgaggcatcctcgtttttttgttcctgatcggcgtccgcggtctcacggccgatgctgtctgccgttggcgatgcgttgtccgggtcgattttgcccatatcctcatcccactcgtcctgcacgacgcgcctgatctccgcgaaagtcggcagagggaagtccggctgataggcgcgacgcacttccgccacacgttcggtgacgcgaatcagcgtatcggtcatgccgtcaatatcctgttcgcgctccatggcgctgaatttggcgatgtactgttccatgagccgcatctgctcatcgacgcttttaagcttctcttcgtcgagttccaccacgtcttcggcatcgacttccggccaaccgatcagcaccgcgtcggcgtattcgagtgaagcacgctgtgccgccgatgcgatgccgtcctcgatctgcacgagaaacacgtatcgtacgatgcttaatcgttcggatgcgagcttcaatcccagataggggtcattgagatccgcattccatgggttcttagcgtcagtcattgtttcctccatctggccgtcattattgttgtgttcgttcatgcccgtacctggcctgttccgtagccgatccacttggtcgtggtcatttcgcgtagtcccatgggcccgcgtgcatgcattttttgcgtggagataccaagttccgcgccgaagccgaacactcccccatctgtgaaacgcgtggacgcgttgaccatcaccaccgccgagtcgatgcgtgaggtgaattcctcaatggccgaatagtcttcggcgataatggattcggtatgccctgtggagtggcggttaatgtggctgatggcctcgtcgagtgagtcgaccactttgacgccgatcttcaacgcgagatactcggtatcccagtcttcctcagtggcatgtatcagtttcaccccgtcaataccggttttgtcgatgatctcgtaggcctgttcgtcggcatgcacttcgacgtcggctgcggcaagcgctgtggcgatttgcggaaggaacgcttcggcgatgtcactgtgcacgaggagtttttcagtggcgttgcagacgccgacgcgttgcgttttggcgttgagaatgatggggatggctttgttttggtcgccggttcggtcgacgtagatgtgtacgttgcccgctccggtttcgatgacgggtactttggagttttgcacgacggcttggatgaggcccgctccccctcgtggaataagcaggtcgatgtggccttgggcctgcatcatggcgttggcgccttgacgcccgtattcgtcgacggaagcgatgagtgcggcatcatatccgtgttcgtgcaatacgtcggcgatgatgttgagggtggctgcgttggtgcgttcggccgcgtgtcctcctctgaggagtgccgcgttgcctgatttgatgcagagtgacgcgacgtcgacggtgacgttgggtcgtgcttcgtagatcatgccgagcacgccgatgggcacgcgggtttgttcgagtcgcagaccgttgtcgaggtggtatccgcgcacgatttcaccgatcggatcctgtagggtggctacgtggcgcacaccttgtgcggctgcgttgacgcggggtacgtcaaatttgagccggtcgagtttgcctgcgtccatgccatgttcggcggatttctgcatgtcgatggcgttggcttccgcgatttcattggcgcgcgcgtcgagtgcgtcagcgatggcgttgagaagttcgtttttacgctgcgtgttggtttgggcaagttgcgcttgcgcgattcgggcggcgtcggctttggcgcacacctcgttgagcacatcgggctccatggcgttggattgggtctgtgggttcgtcataatttcctagattagcgcgaaatcgcgccttgttccgtagcttcgaccattatttcgtcgtagcatcggaaacagggcgcgatttcgcacgtcacgtgtcctcagagatttatatccgaaaccgttctcgatcaaccgttattcgacatggaatcagtggatctgatcgagacccggatacagcgggaagtcttcggcgagcttgtcgacgcgagccctgagggcttccacgtcggcatccttgcctgctgcgagtgcggttccgatgatgtcggcgacctcttcgtattccttgttgccgaagccgcgggtggcgagggcgctggtgccgatgcgcagaccggaagccacgcttgccggacgcggatcgaacggaacggtgttgcggttgatggtgatgccgcactgggcgaggaggtcttcgccctgctggccgtccatttcgctgttgcgcagatcaaccatgacgaggtggacgtcggtgccgccggtgaggacgctgatgccgttgttcttgacatcgtcggacatgaggcgttcggcgaggatcttggcaccgtcgagggtgcgctgcatgcggtccttgaactccggagaggctgcgaccttgaacgcgacggccttgcctgcgatgacgtgcatgagcggaccgccctgctgacccgggaagaccgcggagttgagcttcttggcatagtcctgcttggcgagaatgaaaccggaacgcggaccgccaagagtcttgtgagccgtggaggatacgacatcggcgtacgggaccgggctcgggtgcagtccggccgcgacaaggcccgcgaagtgtgccatatcaacccagaacttggctccgacttcgtcggcgatttccttcatggccttgaagtcttcgatacgcgggtaggcgctccagccgccgatgatcatggccgggtgggtttcaagcgcgcgctggcggatgatttcaggatcgatgcggaaggtttcaggattgactccgtaggcttcggcatggtagaaacgtccggagaagttgattttcatgccgtgggtgagatgtccgccatgatcgagggcaagaccgagcacggtgtcgcccggcttgacgagcgcctggtagacggctgcattggcctgtgcgccggagtgaggctgcacgttgacgtattcggcgccaaacaggctcttggcacgctcacgggcaatggtttcgatcttgtcaacctgctcgcagccaccatagtagcggcgtcccggatagccttcggcatacttgttggtcagcacggaaccctgagcctgaagcacggcacgcggcacgaagttttcggaggcgatcatctccaagccgttctgctgtcgagacaactcagcgttgagtacctcggcgatttcggggtctgcttcggcgataggcgcgttgaacatgtcgttcggagtttgcgcgagaggcgatgcggtcattgagctctccttggcttggaggataaatacgttgcccgtacgaacgtgcaggcttaacgatgaagtgtacgtgcacaaatcgcatgagggaatagggcgtttcgaaacatggaagcaatcacgaaacaagcaggaaacaatcaccacccataaacacgcatcgtcccattccacggacgccaaacacgcttcttcccgcccataacgctacactcaatattgtttgacgttcattgtccgttctattgctaaggaaatccagtgaccacgttccacagcactcgcagcaccaccgattcactcacctccaagcaagccatacgcaaaggcatcgccgacgacggcggcctgttcgtaaccgactcactgggcgaaacccacgtagacgtcgcatctctcgcaggcaagccctaccagcagatcgcattcgacgtgctgagcgtgctgctgcccgacttctccgaaaccgaactcaaggcatgcatcgatgaagcgtacggcgcgcaatggtccgacgaaaagatcaccccggtcaagccgctcggcgatgactacgtgatggaactgtttaacggcccgacctccgcattcaaagatgtcgcattgcagatcctgccgcgtttcatggcacgcaccaccccggccggcggcgacggcaacgagaaaatcatgatcgtgacagccacctccggagacaccggcaaggcggcgctcgctggtttcgcggatgccgagggcacaggcatcaccgtgttctatccggaaggcaaggttagccaggtacaggaactgcagatgagcacgcaggctggttcgaatgtgaatgtctgcgcggtgaagggcaatttcgatgacgctcagtccgctgtcaaacgcattttcggtgatcgtgagcttgccaatcgtttggcttccgattcgcatgtggtactgtcttccgcaaattcgatcaatgtgggacgtttggtgccgcaggtcgtctattatttctccgcttacgcgcagctgctcgaacagcaggtcatcaatgtcggtgatgaggtcgagtttgtggtgccgaccggtaatttcggcgatattctcgccggatattatgcgaagctgttaggcttgccggtcaagcatctggttgttgcgtccgataagaacaatgtgctgttcgatttcctgacttccggcacgtataaccgtcagcgtccgttctatcagacgatttccccgtcgatggacattcttatctcctcgaatctggaacgcatgctgtattacatgtccgacaaggacactcgtctgatcgccatgctgatgaacgatttgaaccagtggggcgcctatgaggttcccgaaccgatgctggccaagattcgttccctgttcggcaccggctgggccgatgaggatcaggtgcgtgagatgatcgcggattgctggaacaagaaccattatgtgatcgacccgcataccgcgtgcggttattacgtgatgcagcagatgcctcgcgatccgctgacgccgcgcgtgctgctgagcaccgccagcccgtacaagttcccgcgcgtggtcaacgagtccttgggtttggatgcttccggcacggatttcgaatgcatggacgtgcttgccgaggcgaccggcactaccgctccggccgcgttgcgcggtttggagaccgccgacgtgcgtttcgaccatgtcgttgacatcgacggtatggaaggttttgtcgagcaggccgccaaagctctgtaaaaactctgtaagcgaagcatactttcacatcgttaaagccatctccatcggccgtccgcaatatgtggacggccgtttttcgtcaaggctgctacagttgcatgctcggaggcgaacaagcatgacagcaccaacgatacccgcatctgaatcggtacgacagaagcaaccggcacaacaatcgaaccagcccgaacagccccggcgtaagcatgatcgtctcatcacccgtgatatggcgttggtcatgcttgcgacgttctgtttcatgtcgagcaatatgcttgccaatccgatcgttgccggatatgcggaatcgttgggcgcggacggcatgctgatgggtgcggtggccgggtcgatgagtttcatctcactgttctgccgccctatcgcaggcaatctttccgacaaaaccagcaagcgcacacttgtggcggttggcacggtgctctatttcgccgccggactgctgtactatttcgcaaactcccccatcatgctcatcatggctcgcgtgatcaacggcgttggtttcgcatgctgctcggtctgcctggccacgtggatgtcgcttttgctgccgatccggcatatgggtgccggcatgggattgtatggcacgatgaacgcgctggctatggcggtcggaccggcattgggtattcgcgcgcaaaaatacatcggttatcgtctgacgtttttgagttcgctggtgctggcggtgatcatgctgctcgccacactgatggtgaagaatggcggacagccggtacgcaaaaagcagacttccataacggagaatccctccactgccgtagacattgacggttctgctagcgcaaccaaaaagcatcgtttttcgatccgttcgattctagaaccgcgtgtggtgccgttgtcgctgacgttcatgatgtttgcgatagcgtatttcgcaaatcagtccttcatcgtgagttatgttcagtctcgtcatctgccggtatcatccgacctgtttttcatgttttacgcggtcgcgttattggtgttgcgactgggcttgcgcgacctgttcgacagcaagggcttccgtttctggctgacggtctgctcgttgggcatgctggcgatgctcgcatgcatgacgttcctgttcaatgattggatgctgttgttggctgcgattttcaccgctgtcggctacggtctgatgagttcagtcacgcaggcgcaggccgtggtaatcgcaggccgcgagcgcagtggtattgcgaatagtacgtattatgcgggtattgatttgggtatgtcggttggtccgtttgtgggtggtttggtgtatgggcatttgcctgctgtgtggttttatccggtgtttatgttggcgatgcctgttgcttggttgatttatttgttgtgtgtgaagcgtgtttcgcggtagttgttggcatcgtgtgcgaggtttctgccgtaaaccagtccaagcgcgtgtcgttctaactgtttttgcggtcggtcgtattttccatatacggcaatatgaccgaccgacgcccatcctggctcgtgcaaggcgtccatgccgaaggggagatgtcaggatcggtccttgccgccgtgttccgttccagcctttccggctatttgacttggtggattttgttgcctttgaccatgtaggcacgtcgggccatgtcgatcatgggctggtcgaatcggctgtctgtgtagaattcgtccactcgaacgttgtctccgtagagttcgcggaatcgtttgggcttgttggtgttgaagttgaggtagtttacgttcaacgtgttgtcgtcgatggtggacgagaccaaatgttgcacgccaagcctgcggcaggcctcgcccacggtgatgtcgaacgaggcggtgaggatcgcatcgtcttcgcgtggcttataccagggtttgatgcgcttcatgttctgatcccagaaggcgttgaccaattcttcgaattccaacgattcggcaagttcgcttatatatccgtggcatagcttgcccacaccgtattccatttgatcgaacgtggctcgtccgagcttgtatttgatggcatagcgcagtaccggggcgatgtaccgcaatactttcggattgtatttggccgaaaacaggtacaggtcgaacaggctttctccgtcatagatggttccatcgaagtcgaatacacgcatgtatgcagctctcacttcctcgtatgcgcgcattcaatacgcgccattgcacctcatgctaaagtccgaaggctgattccttcttacaccaaggtgaacggccggcgaccgcaatgtgcacaaattgcacatctcaatgcacattcggttcatgtcacgtttggaaggaggaacacacagtcggaccgctattcgccccataggagccgttcgcgctgctgatactcctcattgaacaacggctgggccttcgtgtcgatgagcttggcgaattccagatcctcatctcgttccacccgatgctcagccatattccattggtcatggtacgtgtaacgcaatgcctcggcatccgttttcagaacatgcgaccggtaaaggtcccgttcgaatagaagcgtatcaaccagccatcctggctcgtccggaaacttactgatgccattgacgtactccgcacgatacgcgtcatggacaaggacaggcaacgcatcgatacgcaaaagctccttgaacatgataagccgtccgattcgaccgttgccgtccgaaaatgggtgaatcttctcaaacgtccaatggacacgggcgatctgatatggctcgtcctcaagtttcgtgcacatatcaaacagcctgtccataaattcgggaacatcctgcggcagcgcggtccttgtcggagtgacaggattgccgataaagttcggccgagtcttgtagccgcccacgttgaaaagcgagtcggagacctgtctggtgccctgcttgagaatggcatgcaggtgacagaccatatcccggtccaccggctcatcagcatggtcgagaatccaacggaacgcagcaaaatgattacgggtttccaacgcatcatcaggattgacctgttcgctgccatccgtggtataggtaccggtggcaaatagctgcgcggtctgtttggcagtaagggtggaaccttccatatgattggaattccatgcgaactggatttgcgtggtcgtgtaaatgccgtcaccatatcgagtatcacgctctcggataagacgctccacgatacgttccgccataaccccatccttccttcattccgctcgactatcctcccatggtaattcatttaggctagaaaccgtggtggatgtcgtatatcctgcaggttggttccatgtcgaacgtgaccgtgtcgaactgttcgggatggtgtacgaacgtatcgatcagtttccattggcgacggctgatgccgatacgatagtccgggcggaccataagcaccggcgctttcggctggagttcctccaagagctgcgcgcgctgttcgaagcattcatcatcgtcgatccatacgatcggcgcgggttcattctcttcgcattcgatgcgtacgcgtcgttggatggtctgccatttgcctgcctcacgtccccatttggtgacaggatcgtaccaggtgatgacatcgaccagcatgggatcccatccgagcatcgggtcgagaatctgactgcagtatggctgccaggtggacagccaccacaattccacaatgccgtcaactgccaacgcgtacatggcgtcggatagttcgctggaccagtggatgcgccatgagcctacgggcgtgtgggctttttcgttgccgttcaggtggaacgctttttcaggattgtacattttcgcgtagggactgtcgggcttcgcccaggtcataactttgttcacgccgcccctgcgcaaaagcttgtcatccggaaaggcgttgagcaccccatcgaaatccgtgaacaccacaggcttggaaaacattttcaaatccgtcatcaccactcccctttcaatcatcaactatcttcttatattgaccttacggtttcctcattacgttttacctgacaaatactgacagcaccgccatcgttttatttgctatactcggattggttcggcacggacgccgaacgaccgcaggcacgagcataggcaaccgcaaacatggtccatagatgcgcaaaacatgatgcgcggacgcatccaaaaaagcggtcaccatcacgcaaaggagcgaaacatggcagacgaatcatcgaagattccagagaaaaccgtcgaacaaatcttcgacgaacgttatcccctcgacaaatgggaggattcaaactactcgatactcgacaaattctcaatgcgcggccgcaaaggcttcgtcaccggagccgcaggcggtctaggacgcaacgcggcggccgcgctcgcccaagccggagcagacgtcgcactagtcgacctgcccagccaagaagacaagctcaccgaactggcgaaagacatgagcgaacgtttcggcaccaacgtcatcgcgctcacctgcgacgtcaccaacgtcgaacaagtagccgaactcaaaacacaattggtggaacagctgggcaccgtcgacttcgcgttcctcaacgccggagtcaacgtaccgggcgacgatcaagacgccaccgaagaagtatggacgcgcaccatcaacatcaacctcaacggcacctaccgtaccggccgcatcgcgcatgaaatcatgcgcgaacacggtcatggcggctcactgatcttcacagcctccctgtccggacacaacgcgaactacatgatgggaagtccgacgccggtgaacgcgtatggcgccaccaaagcggccatcatggaacactcacgttaccttgctgccgcgctcgccaaggatggtatccgttccaacaccatctcccccggatacgtgtggtctggaattttcaatggccgtatcgacatgcctggccacgacgccatgctcgaggtcgtgccgatgcatcgtttcggcacgaatgacgagattgccagcacggtgctcttcctcgccagcgacgcgtcctcgtacgttactggcattgacattcgcgtagacggcggctacagcgtcttctaatcaccgtaccccatctgataaatggccggtcgcagctaatgtgcttcgaccggccatttatctggtgatggtttctagaacataccgctacacatgcttgcggcgtatcaacgtaccggcagtggttccggctcctgcaaggagaagcatgaccgcgataatgggaacgatgtcggagcccgtgcgaggcaagtccgcagtcggttttccatcggccttgctggcattcttgtctttcgagggctgcttgtcattcggcttggcctcgccaccgcccggctggtcatcaggcttcgtttcccgaagcttcagaccgtccaatgccgtgttaaggagcgtggcggcattggagacaagaccgttctgttcgctgctgaacgtggtgttgttccacagcgagaggacctgctcgtacgcttccgtgagagatgcgaccgtatcgtccgtgtatttgccgaattcggcaagcttggcctgtgccgccgcgatcggagcttcgagcgcgctcttgtcgagttcggtcggatcatcatacatggcctgatatcctgggatggtcagtttggcgagctgatcgtacatcttggagcagaggcgagcgttgaagttcatgacactgaaccctgcgcgggacaagttcatctgtcggatttccagattgtctggatcgtaggcgccttcggcgaacgtcatgtcggccgattcgctgtcggacgcgcccttgcctgttccgctggtgtcgagcgcgctgcccgtggagtagtcgaacggggtgccatccttgccgctccatgcgttgatgatgaggctcgacgtgcggaacgggtcagatccaactcctgcgtagttgtagaccgcaatgtccttgccggaggaaacggtgtcgccgttctcatcgacgaagtagatcgggttgccgtcgacgtcgagcggatacccgtcgggaccccacacgttgtcggtgatcactgcgagaccgtcacggtcggtatagctgcccatgcgggattcgcgatgccatgcgttgccggtcgtggccgtcggatgcagaaacagttcggctccggacgcggcataataacgaccgagttccggatagaagtggccgtctcaacaaatgtcgataccggccttgagcggcttgccgtccgagccggtccactcgggcatctcgaacatgaccggcgtgctgccaggcaacgaccatgcggtttcctcggatccggcgcgatgcatcttctggtaggagtcggtgtgcccgtcagggaacgctatggcggcagaattgtagaccttccgcacgccgtcgctgtcggtgatgagactctcggtgatttcagcttgggaggccgccatcttgtatgctgcggagtctaggtcgcttgaggaaacgtagccggtgagtgccgcgacgaaggccatggtggcgcacaatgcgacgctgcccaccgccgcaaccgccatgttgagctgtcgtttgaaccatatggatttcgcggtgacgttcgctgccgcgtctttgttctccgttgtcgtacggtgcgacgtggatgtccctctcttcaacgcgccatgcttccccgaaatttccccgttctggaaaacatcataggagataaacggaattgtatgacagttcgttttccacttggcttctgaattccgaagagtagctaaagagtactcatgcccgattctgcgagcgcgatcatttgacgtttcctttgttgttgaacaccgttttgctcatatctcgcttatgtatggcagatttgcgaacgtgtccggagatatcttgcttatatatggcaggtcagtccgtcaaagcagtaggtaggggggcatgaaaaacctcattttcgcgaaaccgactgccatatataagcgagatgcctcatgtcacatcccgaaatctgccatacataggcgagatacagcctgctttgctcagcacaaggccgacagatccagaaaatgcgcacgatgacacgtttcaaaccatacttcgcgcaggatctttttccgatttgttcccttgacaggtctgacgcctactgtttggagttcgcggcggcgcgcaacgagtcaacgaactgtgcacacgcaaaggcgggtatgatgacgtttattctcgcttggtatcggcacttgaaatccgaagaacagtaaggagataatcatgtccgacatcaatccgtcagtagcctcggcagcacagaaccctcctgcattcgcacgactcgaagcgggactaacggccccggactttacacttcccagcgacaacggcggtagtgtcacgctctccgcattgcgcggccaaaatatcatcctatacttctaccctgccgcgatgactcccggctgcaccaccgaggcctgcgacttccgcgacaacctcgcacgcctaagctcccgcggattcacagtgctcggcgtttcgaaggatccgctggacaagctcatccgattccgcgagcgcgaccatttgacgttccctctgttgtcggatgctgatttgaccgtgcatcgtttgtatggtgcgtacggtgagaagaaattgtatggcaaggtttacgagggtgtgattcgttcgacttttgtgattgacggtgatggagtgattcgtgttgcccgatacaacgtgcgcgcgaaaggtcatgttgattctctgctgcgtgcgcttgataagcttgatggttccattttctaatctggaatgcgatgccgctttgtttatagatcagctttttcatgcgaatgacgcaagcagtgtcagtagcgggtagatgtcgaattcctgatagtggtcgtgcagtgtgccgatatcttcgaacatgggctcttcggcgagcctttcgaaggtctcgtaacggcacggggcacggcctcgtaagagaagagaaaaagcgcgatgagactcagacttccgacaataaatcatcgtcttccgacatgtcagcccacggcttgcgtgtgcggtttgcttgatcgtgttggcgatgcgttggctgaggagcgtgaacgtttggagttgaaggcgattgaaatgctgaagggaccgaagtgtcttgtgcagccggagccggtggatcatgcttggtgggatgatggttccggcgtgtacagcatcggctgagggagccggtaggctgggtatgtaaatccagcagagaggaacgtgccatggtgacgcgtcgtaatgatgagcggacggttgcgggaaggcatcgcatgatgaggcgtgccgaccgtgaggtaaccgaaccacagcagatcgatgcgattatcgcaacgtgcaagatcgtgagtcttgcatacaccgatgcggaaggcatcaccatcgtgccgttgaatttcggatacgtgttcgatgcggaatccaatcatctcaccttgtatttccatggttctgcgaccggacgtaagatggacgcggtcaaggccgcaaacaacgcgcttcccgtggcgttcgaaatggcgaccgactgcgaggtggtcgaaggacgtacgttgtgcaattggggcgaggcgttcaagtcgatcgtcggcaatggcaccgcatccatcatcgacgatcttgacgaggcacgccaggggctcgcactgctgatgaagcagcaggccggcatggaacatgcggaattcaccgaccagcaggtacgcgccgtcaccgtatggaaggtggaagcggactatctcaccgccaaagtacgcgaaaagccccagctgcatacgcactgacctcataccgcaccttgacgcaatgatgcgctgcttccaagcccgaggatgggaattgggaacagcgcatcagatgtaaaacgctagaccgaagtccggctgcggccaagttgcaagtcaggccgtaacccggtcgagataaggtttcaaatcaagccttccggcgggaacgccgcgcgtagcttcctccaaaaatcgcggaggacaccatcacgacggtcgccacgatggcgggcgtcacgtttgaaccggttttggcgagcttgaccgcatcgccgccgttcgcggacgatttcaccggatgcttccgctggccgttcgcatcattcgcacccggagccttctgcgaatcatctggtgtcgattcatggcccggcgtttcaggctgaccttcctcatccgtcagtcgggcatcaaccgtggttcccttaccattcaggcagcttttcagctcgctttccttataccaggtcgaaccatccgcaattggcgtgcaggaatcgttgaatccgatttccttctcgttgtacagcattctgaccaacggctgatacggctgccccgagacgtccgtaccatcacgcacgaccacatcccactgcacattcgcagccatcggcgtcacactttcgccacgccacggattattctcatacgtgtacagttcactcgcctgctgctgcgatccaggcagcttcagcaatgccgcaaacggaataatggtttcggcatgtgcgaatcggaacgtcgcggcggtgccggcccgctccctcgtgtcgatcgcattgaagaaatcgtcgagcaacggctgggcaatgcggtaggtctcatcctgacctgcgcgccccggtcccttctcatagaagtcctcggcatcaagcgaccaagcaaacgtcttagcctcctgggcgtgctgaccttggaagtactggtcgaaattgaacgtgtgggatccggtgttctcctgttccatatcggccgcgatgatgtacagattgtacaaatccattgccgcatcctgttccgacgcgatcttcttcttggcgtcaccgcacgcgttcgcatccttggcagggtcggcgccagcagcgcaattggccgcaccctttttcgtgccgtcagccgtgttgtaccagatgcgctggccttcctccttgccgatggacgcgaggaaatcgtcagtgaagatttgagagagcagattatgcgaagcggtggtcatggacggatcgttcgtcacgttttcctcagcttcggcgatgcccccatcattcgcgacgaactgctggtaacgttccgcgcgctccttggcctcgcccgttttctgcgtaccatccggattatcagtcttatggaaatacaacgtggtggtgttcttgtcgaaattcttgccggaattgttatccgcaggattattcggtgctacaaccgcattcgccagcaaaccgttggaagcctgatcgaatcctagtttgaaattctctccggattcggttgcacgaggctcacccgagctctggtatgagacgcgcagtccctgctttgcggcattggcgaacagatcagcatcacgctggtatattctctcaccaatgccctgatgctgtatggcgccctgaccagagagcatgccatacccgttgcccacgttggccgcagtaatggcattgacattgttgatgaattccttgccaacctctgggctaacgaatccagcataattgttttccgcagcagactgagccatcagtgccagcaaagcgtcatacttgtagctcgacaggccacgcgagccatgccttgccacagactcggtgtatgcaagatggtatctgctcggaattgctgaatatgatgtgctcgccggcgcaacatacggctgcttgctgctgtaataccgggcggttccttccccagccaaagccgctggcgttgcgagcatggccgctgccactacagcgcttgtcaacgcgagcatgccaccgcccaccgatttggtaccgcgtttgcgccaggctcctgcctgccgctgttcctttgttgccgtatggtttttcgccattatcctcattcttctacctcttctgctttgccacattgaagctgtcagacaagccagcctgggcgacaaaataggctcggaaggcgaacacgcaacgccttaaacgtgaacgatcgacaaataatccgcgaaccgtcgcttagaactcaagtaagttgcacagccgcaactcccccaccccatggattcacgatgctcgacgtatcacagaacctgctggacaagttccaccgatttcgctgcggacacccccaatcaacgcacatcattatggctggccgattgtcgacttgacacgtggaaacgtccccgcctttcacgtcaggaccgaaaacccaaagtatgcaagaatccggacgttacaggatgcggacgttttcttggagactgaatgaaaggattatcgtatgttcggtcccgaggaacgacggcgcggaggggtccttcggacgcatgaagatggagtccgtccatcccgggcattgggaggaacgtacccgcgacgaggtgctcgtcccggtcgacgactgcatccgttggcacgaccacgagcgcatcaaacggtcgctcggttggatgagtccggtacaataccgtcagagccagggaatggctgcgtgatcatctccaagaaaacgtccgcagcccctctgccatttgcgatcagtcatggcacgctgattccaatgggtttcagcagtacgctggatgacgcattatcgcaaagcgtcgaacacgccatcaatatgattgccgccatgttcgagatgccacgtcaacaagtgtacctgctgctgtcggctgccatcaacttcaacgtgacgcaagtcgttgatatcacaccaaaggcgttcacggtctgattgatctgtcgatgtttcaacaactacccgactatgaacggacgatacgcgatattggaaacagcagatggactgccatgcggcgcatgccttattggcccagcaggctcagacaagtcactgattggtctagccaaagaactctataagggaatggaataacagatggtttccccaacaaacaatcatgcagcaagatagcaacaccacccaggcgacggatcgcgccgaaacggacgctctctccttcggcgcgaagaaaatcgcaatcatgattggcgtgggactcatcgccggttccctacactgcctatgttgatgaccatgccgttggcgtagctgatctacctgtgtttccgccgtatcatccatccgactcgcgcataaccgtccatacgggaatcctcgaacgcaagtaaatgtcgcttccgtcaatcgtcgaccgcaagaggcgttcatggagcggcggatttccttatattccaacaaaacccgtactgttatgcgacacgtaataacagtacgggttttctgtgttactgttatatataacagctaaacagtttgcatctaactgttcagccgggagatatatcacctacgaaacatacagaaacagaggcacagattgaagctgatcatctcatccgtgtccggagaaccgatttacgaacagatcaagaaccagatcaggtccgcgatcatgtcgggtgagcttacagcaggcgaggcgcttccctcactacgcaagctcgccaaggaactgcgcgtcagcgtgctcaccgtgaccagagcgtataacgaactggccgacgaggggctcgtggagaatgtgcagggcaaaggcacattcgtgatggaacgaggcaacgaactcatgaaggaacgtgcgcgtgaacgcatcatggacaagctccgtgaagtttccatcgaggccaaagccgccgacattagcctacttgatctgcttggcatgttcgagaaagcgtacagggaacaatcatgaacgattcctcactcccccaaggaacgcggccaaccttggccttgagcgtaaccggattgacgaagcattatgattccggcttcacattggatgacgtgaccttcgacctgccgtccggctacatcatgggtctggtcggtccgaacggagccggcaaatccacgttgatcaaactgatcctcaatatgaccgcgcgagacgcgggacgaatcgaagtgctcggccttgacgcgatggccgatgaggagcgggccaaagagcagctgggcgtagtgctcgacagcagctatttcatcgaatacatgacggtcgacgcggtggaacggacaagcagcccaatgtacccgctgtgggaccacaatctgttcgacgcatatctcagacggttcggactcggacggaacaagaagatcaaggatctgtcgcgcggcatgcagatgaagctcatgctcgccgtggcgttgagccacgatgcgaaactgctgattctcgacgagccgaccagcggtctggacgtactgtcccgcgacgagctcatggacatcctgtccgattatgttgcggatggcggacacagcgtaatcttctccacgcatatcaccgccgatttggagcgttgcgcggatttcctcgcgtatataacgaacggcatgctgtattacagcgggccgaaagacgagttcgaagacgcgttccgcctggtcaagggcggtccggatgagcttacggatggtctacagcgggcaatggtcggcatccgcacatacgcaaccggcttcgacgcgttggtccgcacgcaggacatcccacacatcggcggcaccgacggtctcctgacacagcatgcttcgattgaggatgtgatcagactgaccaacgccgcggcacatacggcaatcggcaataccaacaaaggagacgtacgatgaacacgacagcgaacgcggacgccatgaccgccatccttaggcagatttccttggactggaaccgcaccatcagctacgggcggtcgtacatagccatcttcttcgcgtacgttccaggcttcacatgcctgatggcggccacagggtccactctcgacagcgttgcgggagccgccatcggcggggcggcctccggcttcctgatgcttaatatcaccctgttctcctatgaacaaatgaacaaccatcattggatgaacggcatcgtgcccatcaaccgcaaccaccagatcctcggacgattcgcattccttatcgcctgcgatctggtggcgggattggaagtggccgccagcatcgcctgcgccggcaccatcatgcacgagccagttaaagtgacggatgcgatcgacttcgccgcgatgaccgtgctgaccctcgtgctgctcaacgccatcgtgcagccgttcctgtaccggttctccccttatcgcgccatggccgccattattctgagcatcggcgtgatcgtgggcacggtcatcggactgcgcaaggcattgccggaattcgaaaagaccgtcgaacagctggccgaagcgatcagccggcaccaagccattgcattagcgacattcttgatcatcgacgtactcgccttggtgttctccagcaagatatcgctgcatatttacggtagcaaggacatctgaaccgagccagccggtagactcttatggaacgtatttggggtcttccgaatcaacggaaagccccaaatgcatatatccccgcacgacgccggttcctacaatacggcaggcgcgtcatggaagtcgaacatgacaccatccgccagaccgcaaatagccggccaatcggcatcggacgaatcgtcgtgcatggcccataccttcatgccaaccgacttggcggaacgcatgccgatcagcaaatcctcgaacacggtgcactcccccggctcgactccgaggcgagatgcagccaacagatacacgtccggctggtctttgccgacgtcgccggcatcatcgacactgaccacttcatcgaagtagtcgaaaatgccaacatgcttcatcgccggctctctcagcatcggcggcagcgatgtggcaacggcaagtttcgctccactctctttcaattgagcgagatattcacgtgcatacggtttagcttcgaccactgtggcatacatgacgcgggccatatgatcccactcatccatcagctcttcgggagtgtcggtaaggctgaaacgcgcaatcgtatattcggcgatctggcggaattgcatggccgcgactttcgtcatgtaatcgtccggcacgtcaatgcctcgttttgaaagaaaatcgatgtcaacctgatcccaaacgcccatggaatcaagcagcgtgccgtcaagatcgaaaatggcgcccttgccttgattgcctgccatcgatatcctcctttattattgtgcatcttacgttaatcgagaaccgatgatttgagcagttcttcggcatgttccagcgacgcttcgctttcactgccggagagcatacgggcgatttcgtgcacacgcgcctccccacgcacttgattgatggtggtggcgattgatccgtcatccatttcacctttggcgaccacgtactgttcgtccgcccaggatgcgacctgtggcagatgggtgacgacaatgacctgcgcggattgagcgagtttcgccaatcgcgcgccaagctccaccgcggttttgccaccgacgcctgcgtcgacctcgtcgaaaatgaacgtcatgggaggtacggaaccgcccgccaccacatgtttttccgccgcaacgagttcaagcgcgagcatgagccggctcagctcgccgccggacgcgcttttgcccatcggcatttgcggcgaacccgggaacggcgtgaacagaaaatcgatgccgtcagcgccggaagcgtccaaatgttcacgttccgatacacggatctctagtttcgatccgctcatggcaagagattcgagttccgcagtgactttggcggcaagttccttcgcggcggcggcacgtcttttgcttaccgcacgcgccgccttcaacgcctcaccgaacagtttttcacgttccgcctgcaattgactaactttttccggagacgcgtccagatcctccaagtcgaacaccgcttgatctcgccacgcgatcacgtccgacaattccgggccccaacgacgaaccaattcgtcaagctcatggatccgcccgttgatggcgtccaagtcttccatgccgagatcattgtcgacttcgcccgacaaggtgaacaccacatcagacaaatcagtgctgatggaatcaagccgatcggccagttccgaaaacacgccgtccacatgaatggcgcgaagcgcttgcgacgcgcgatcaatcagatcggtggcgctggatgattcaacatcgtcaacaacctgcgaagcatccaacgcgctcaacgcacggttcaccccttcggcgatctcggccgcgttctcaatgcgatcacgccgggcacgcaactcggccatctcccccggctgcggatcgatgcggttgattcgttcgatggactcgcgcaggtaatccgcctgctggcgcatggacgactcctggctcgacaatcgctccaaccgctcatccatggcacgaagcgcattccaagccttgccgtatgcgaccaacgccacatcatcgccggcatagcggtccaaaaactcacgttgccgcgccgaagacgcgatacgcaactggtccgcctgaccatgaatcgtcaccaactccgctgcgatcgaccccagtacggaacgaggcacactacgaccagacagcatgctgcgggaacgaccggaggcaggaaccttgcgagacaggaacagttctccgtcttcaggttcgaaacccgcctcgtgcgcggctgcgaccgcggccggtgacgaagcgacctcgaacacgccctgcgcccacgcctcgctcgctccgaccgacacgcgcccaccgtcggaaggaccgccggaaatcagccgaatcgcactgagcagcatcgacttgcctgcacccgtctcaccggtgatcgccgtcataccgccggcaggcgcgatcagcgcggaacggatcggcccaagattatgaatctcaagttcttcaagcatcagtgtttttactcgttcgtttctttatcttccggaaacacatgcccatgatgcactcccccggttttacgcgcctgctcgcgccaaccgacaacaggaagatcgaatttcgtgaccagacgattcgtgaacggcacgccggaaagacgggccaggcgcaatgtgctcttcgattcgcgcacctcaaccctagtgccccgcggcaacgcgcattggcgacggccatcgcagcagatccaaccatccgacgtggaatcctcaaggatatcaatggcgaatgtggaaccggagccaataatcaatgggcgagcgaacagggcgtgggcggccaacggcaccaactgcaacgccttcacgttcggccacatgatcggtcctccggcggagaacgcgtatgcggttgagccggtcggagtcgacacgatcacgccatcgcagccgaaggagctcatttccacatcatccacacgaatcgacagttcgaccattttgccacggtctgcacgctccaacgtgatgtcattcaacgcccaatcctcaatcggctcgcttgctcccggcagccacacatcgacatgcgcaatcatgcgttcgtcaatggaataatcatgctcggcaaccctgcggatcgcctcactcatctggaagctttcaaactccgccaaaaagccgacatgtcccaagttcacgccaagaatcggcacactggtgcagtgcaccagttcagccgctcgaagaatggtgccatccccgccgagcaccaccacgatctcagtgcgttcggaaaccaccggcggctgcttgccgaaatccggcgcctcgatattgtcaatgatcgacacttcgaaaccggcctgggtcagctgcccgacagcctcctcaaccaccgtgccactctccctcagacgactatgcgtcaccaccaccgcatgacgggtaccgaacatcgttaatccctttccagcaaaaggaaacgccctatggaaaacgcccatgaagacgtcaccgacctccagtgtaatcgaacaaatgaacgaaaaccggcaatgcgcgtcgaaaacatgccaaaacccgcgaacacgcctcaaatccgtctccgatgcaagccacgaatcaggaatgtcagccgtcaaatagcctgttagtcgcacatatgcttacaatagctcacaggaacgaagaccgaacatcgtaagaaaaggagagaggaacggcatgtcaaacctcgtctttgacgagtcctcctccaatcgtgaggcctcacatggctacgcatggtggttctcgggagatactttcgagaaggccatggcggaagaccgcaagccacgcaagcgcggcctcacgcgccgactcgtcaaccatccaggccgtctgaccatcttctactttctgacgctcgcggcgttgtccactacgttgctgatgacgcccattgccacgccgaaagacgaaaccaccacgttcaccaccgcgttcttcaccgcagtatccgccatttccacatgcggaatctccatcgtcaactccaccacgcattggaccaccttcggccaaggcgtgctcatcttcgccgtgcagatgggtggccttggcgtcatgacgttcgcctccttgatcgcattggccgtgaaccaccatctcaaggccacgcagcgcatgctgaccgccaacgaactcggcactacgaagctcggtgaaatcaaaggcgtgctcaccgtagtcatcaccaccgcattcgtcatcgaaggcatcacattcgtcgcattgttccccggcctctacaaggtcaaccacggtaatgtgcgccacacattgtgggaatcgttgttcttcgcggtcatggcgtacaacaacgccggcttcacccccgacggcgccggtctgcatgtcaacaactgggcggtcggcctgccgatcctagccagtgctttctgcggaacccttggcttcccggtattgctgaacctgatgcgttcctggcgtatgcgtcgtcctccgaagcgttggagcctgcacaccaagctcacactgaccaccacgttctgcattgtgatcgcctcgttcacgtggttcctgctgatggaatggaacaacaagctgctgttcgccggaaacggcatcgagccgcgcctctggcacgccatggtcgcggccgtcatgccacgaagctccggatttgacctgtcgtggatgccaggcgtcagcgacgcaaccaaagtgttcctgtccatcgtcatgttcatcggcggtggcagcacctcgaccgcaggcggcatccgcgtcaccacgttcgcggtgaccctgctgacctgtcgtgccgcattcaccggacgccacgacatcaacgcattccaccgccgcatccacacgcaggcggttatgaccgccgtggccgtaagcacggcatgtctcatgctggtcaccgtggtgtcgatggcgctgatgatcatcaccggctgctcgctgtgcgacgcactgttcgatacctgctccgcgttcggactgggtggctactcggtgggcgtagccagtgaaagcagccccacggtgctatacattctcgccgcaaccatgttcatcgggcggctcggaccgctcaccatcgcctacgcgatttcgcgtccacacaatctcgaggccgtccgctaccccaccgagcagatcgtggtcggctgacgatacggcttcatatacttgcagttgcctgcaatcacacatgaatatagatttttgaagatggaatttcgaaaggtgcataacatcatggccaacaacaccagaagcgttctcgtagttggtttggggcgttttggcagctctgtggccaccacgctcgacatgatgggccaggatgtgctcgccgtcgacaaagacggcgaactggtgaaccgttggtcttcgcagattcccaccgtgcaggccgacatgaccgatgtgatggcgttggagcagatcaacgcatccgatttcgacacggccgtcgtggctatcggcgacagcgtcgaagcttccgtcattaccgccggtaatctgctcgacgccggcatctccgacatttgggccaagtccgtgtcgaaggaacacgcccgcattctgcaacgcatcggcgcacgccacatcatcaacgcggaaaccgacgccggcaaacgcgtcggacatcttgtgtccggcaactatcttgactacatcgagcttgaaggcgcatacaacgtcgtcaaaatccatacccccgcgcatgtggtcggctacaccatcgaagacgctcgcgtgcatgaacgcttcggcattaccgtggtcggcatcaaatcgccgggcaaggaattcgaatacggttcgaaagagctcatcatgcaccgcaacgacgaactcatcatcatgggcaagcagaatcaaatcgaccggttcctacgcagctgacacgctctttccatatggaaaaatccggaatttcataatcatgatttccggttttttttacttatcttatttgccttgattacactgcagacacggttctctcaaccggtcgctgtttcactgcatgaccgcgtacagcagatattcgatattgccatgcgtgccttcaatgggagatactgttgtggcgcgcacgtcaagcccgttgcgttccgcgcatgccacgacggaggacagcgcctgttcgcgtaattcctggctttcgacaatcccgtttttcccaaggttgcctttgccgacctcgaactgcggtttgaccagcagcacgatctgcgcctgcggtgcggcgattcttgcgatcaccggaatcacatatgtcagcgaaataaacgatacgtcggaaacaatcatttccggacgatacggcaaatcctccgcatacacgtcgcgaatattgacgccgctcatttcgataatacggtcgtcatgcgcgattttcggatccaattgcccatggccgacatccaaagcgatgacctgcgcggcatcattgcgcaatagcacgtcgcagaaaccgccggtggacgcgccgatatccaagcaacgtaatccttgcgcggaacgcaatccgacgtcggcgaaccgttcgaacgcgccgacaagcttgtatgcgccacgggaaacgtagccgtctcccctatcggcggcgatgacgtcatcaccaccgactttcgccgatgctttggtgacggtgacaccgttcacactgactttgccatccgcgatcagacgttgcgccttggaacgactgtcggtcagaccacgttccaacaacgcaacgtcaagacgaacaacctgagtggaatcactgtttcgcaatggttttccaataatcggtacgaattgttcgttaggaaatacggaattccggaacgatcacgccactcacatctcgcccgctgtcggccgcggcccacatggcgcagcatgcggcacgcaacccgtcgacgctggtgatgtcggtgacatacaggcggtcgccgtcaacgcgggccttcgcatcgcggcacagccatgcgccctcatcatgcaccacttcaggagcgggctcgttcaagccccgcagatctttggcgatgtaggtcgggcgaagatacgccggagcgaacatgagttcgcgcggatcggtgacgccggtcaacaccgcaagggaatcgtacccgccccgattgcccgcctcgatatcggtgtcgagacggtcgccgatggcgaggcactgttccttgtccaccggctcgccatcatcatgggctgcgagaatgcgcgcctcgtcatacatggcggattccggcttgcctgcggacgaaaccggttccacaccggtggcattgatcaccgccatgatcatggaaccgcatcccggcgcgatgccaagctcacgaggaatggtcagatcacgattggtcacgaaataggtcgcgccatgctcaacggcataggcgatttgggccatttcgttccaagacatgtcgggataccatccttggatggcggcgaccggctgcgcttctgcggaatcgacgacttcaagaccttgcttggccacttcctcacgcagatgctgggcgccaagcacgaaaaccttcgaaccttcaggcacggcacgtgccaccatgcgcgcggcgacaaccgacgaggtgatgacctgccaggattcgacatccaaatcgaaccccttcagctggtctgccaccacggcctgaagtcgggacgaattgttggtggtgtattccaccgccatgcccaaggattcggccttgcggatattcttggcagcatgttccaccgggttcttaccacggtagaccacgccgtcaagatcaagcagtgccagcgagtatgcttcgctgagcggctgattcgtggacttcagcatgcgggccacgtcacctcacttgttatcttcggaggattcggaagaagcatccgaagactcttcggcctcttcagcctcaccgtcatcatcggcgtcatcttccgcagcatcgtcagcttctgccggctcgtcatcggattccgcgcctgcttccgtctcttcggcctcaagctgggtttcgtcgttggtttcgccgttctcgtcgatggcttcggattcgtcttcctcattctcagggtcttccggagcgtactgcgcgtcatcttcggaaatgccaagcacgtccatgagttcgtcgttcagctcctgcatgtcgtattcgacaaccagatcgtcggaagtctcatcatcctcaacatcggcgtactgcagttcgagcttgtcgagcagacgatccaatgcgatggcctcatcggtacggccggcctcttcaaggaaatactgttcggcctgcaccgcacgcatgcggtattcgccggccaatcccttggaacggcccagcgtgtgcacgatctcgatggccttgtcccacatcttcagatcgcccagagcgccagcgtacaccaagaacatttcagccttggcttcaccgcgcagatacttggcgtcgtcgctcacagccacttcgatggccttcttcggctcgcccacgccacgctcgcagtcggcgatgaacggcagataatccaggaaaccgttcatacggaacgcggtgcggaactcacgcaaggcaagcttgtaatcaccctgacggtatgccacgaaggcgagtgtctcgcgggcgaaatcgatgcgggaagcctggcgggccacccacttggcatgttcgagggccagctccgggttgctctcctcaagcgtgtacgcggcaagaatgtgcagaccaatgttttccgcatgttccttcgacaggccacgcaggcgttcgcgatcgtcggtggtgagcatacgccattcgatgcccttcggcatcttcggctcatcaggacgacgatgcgtgtacgggttctgcgaggggaagctcaccgtgccatcggaattgcggcgcggcttggccatgtactcgccacgcttctcctcacggtaggccatcttctcttcgcgggtgaactcacgacgctcctcgccctgctgctggtcgcgatccttgtggaagtcacggcgctgatcgtcacgacggaaatccttacgatcgccatcacggaaattacggcgtccgccatcacgacgatcattgccacggtggtcgtcacgacggaagttacgacgatcaccatcacgatggaaatcacggcgatcattatcgcggtggaagttacgacggtcgccatcttcacgacggaagttacgacggtcgccgtcacggtggaagtctttacggtttccgtcacgtcgatcgtcacgacggaaaccggaacgctcgccatcgcgctgatagcgaggattgtctccacgaccgccacgataatcgcgatgatcgtcacgacgctcgccgtcacggttgaacttgcgcggaccgttatggaagcgacgctcctggccttccccctcaccgtcacgacggaaatcgcggtcgcggtggaaattgccgccattgcccttgcggtatccgcccttatgatcgtcgttgtggaagccgccggacttgtggccgtaggacttgccgccattgccacgcggcttgaatcccttgccgccgcgatcgcccggcttgcccgagccgtaggacttgtggttgccgtaggacttgccgcgcgatccgcgctgttcttctgccatgctgttccttatattccttgtattccttgaaaatggtcttcgtttgttctttgcttacgtttgtttacgccgctcgcgattgcctcacacgttttcgacgacgccgagggccttcttgccgcgacgaatcaatgcgaaacgtccatgcaggaagtcattttcgttcaaaacctgctcttcgtctttaacacgggcgttgttcagatacacgccgccagccttaatcgtcttgcgcgcttcggaaatcgacttgaacagtccggccttcatgccggcttccgccacacggtcgcccaccgcggccttggcgaactcgccgtcgatcttcacgccgtcaagagcagcttcgagcgtggactcgtcaacgcccgcaagatcgccgccacggccgaacagcgcaccggcggcctcgatggcctgtcgggtggcttcctcaccatgaaccaggctggtgacctcccaagccaaggtgcgttgcgcctcacgcgcgcccggattggtcttgctttcctccacaagacgttcgatctccgccttcggcaagaacgtgaacaccttcagcaggttctccatctcgctgtcagggcggttgaaccagaactggtagaacttgtacgggctcagcatagtgccgtcaagccagacggcgttgccttcggacttgccgaacttcttaccctgagcgtcggtgataatcgggctggtgaacacgttcacatccacgccacgtaccttgtggatcaggtcaagaccggacgtgaggttgccccactggtcggatccgccaagctcaagcacgcaatggtattcgtcgaacaggtgcaggaagtcgttgccctgcagcacctggtagctgaactcggtgaatgaaatgccatcttcagaattcagccgacgggcaacggtgtctttggcgagcatggtacccaaacggaagttcttgccgacgtcacgcaggaagtcgatgacgttcatggaggcgatccaatcgtaattggacacgaaacggaccggattgctgccttccacttcgagaatgccgccgatctgcgccttcagacgctcggcccaaccagccacgacgtctttcggattgagcgtacgttcgcccgattggcgaggatcgccgatcaagccggtggcgccgccgaccagggcaatcggatgatggcctgctgcctgaaggtgacgcatgttgatgagctgcaccagattgccgatatgcagagaggcagcggtcggatcgaaaccgcaataataggaaatgggatctccgttcaacgcttcggcgagtcgatccctgtcagtggactgggaaatcaacccgcgccattccagttcatcgaggacggactcgaaaccggcctccttgaaatcgatgacgtgagccatagctgtgttttctccctattgaattgcggatgatactgcgttttacgcaccctacagtttcgcagaagatgaagacaggcgcacgcggtgtttccccatcatccaccaaccatcgtgcatacaggtaaagttagaaggagcatccccatatcaagaagggagatacctgcatggaccgcaaaggcatgaaggttgcggctaagaaagcccagagaaaacattattggatgatagtcgccatttgcctgttcgcttcggtgttcggtgttgcgtacacttcatcgacgctctcggtcagcaccaacatttcgatcagcaccccgcaaacggaggattccacgcaatccaacgacatgtatgacgtattgcaggatcttgccgtaggcaatgaaaacgatgcccgtgaaaaggtcaagcaaaaccaagagcagatcgtcaacaacgataccgatgccacgttcggccgtcgccgcggagtaatcgcgtccctgctcaactcgtttgcatccggctcgatggtgatcgccgtggccgacgccattaattccgtcacccataacggcggcgtctccatcgccgtgccggtaatactctcgctggccgtctacattttcgtctggctgttcattcaagaaacataccgcatcgtcatggcacgtatgctgttggaaggacgttcctataacaagcttccggcaagtcgcttcttctaccccattcacacgcgcaaatggccgcgcatggcatggaccatgtttgtggaaaacgtgttcctgttcctttggagtctcaccatcgtcggcttcttcatcaagcaatattcctaccgtatggtgccgtacatcgttgcggagaatccgaatatcgaggctttggacgccattcgcttgtcccgacgcatgatgaaagggcataaatgggaatgcttcgtggcggactgctcgttcctcggctggtacctgctcaaccttatcaccttcggcttgagcggcatcttctattccaatggctacaatgccgcgttcttcgcggaatactatgtgtacgtgcgttcgatggccaagactaccggcattgcaggcagtgagatgctcaacgacgaatacctgtacttcaaggccgacccgcagacgctccataccacgtacgccgatgtcgcccaatccgtagcacagctggaacagaatcttgttccagcgcccaagccgcatggattcacaggatttctttctgagtggcttggcatccgcattctgcatgccagcgcagtgaaccgctatgaagagtatcgtgaggatcttcaccagatgcagatcggcgagaatattctgaatggctccatttatccggggcgtcttgcgcctgctccgatgccgttcaaattccgtgaatcacgtaccatcagcgccgaccgcagctactcactggtcaatctgatcatgatgttcttcatcttttgcttcgtcggctgggtgtgggaggtaggtctcgcatttatttccgaagacatgttcgtgaaccgtggcacgctgcatggcccttggctgcccatctatggcaccggcggagtgatcattctggttctgctcaaaaagctgcgcgaaaagccagcgcttgaattcgtcgcggctatggtgctgtgcggctgcttggaatacttctcatcgtggtatctggagatgacgcatgatggtcaacgctggtgggattacaccggatactttctaaatatcaacggccgtatctgcgccgaaggattattgacgttcggccttggcggattgaccatcgtatatctgctggctccggccctcgacaacctgctcagcagaatcgatgcgcgaaagcttggcatcgtggccgccgtgctgctcgtgctgtattgcgccgaccaagtgtattccgcgcaacatccgaatgtcggtgcgggcatcaccgactacaagggatcggacacgtcgctggaagcgcccactccatacgaaatccgtaaacgatccgatggactgtcatagcgtgattgtcatacaaatcgcatatcgcaaacaataataaaatcgcctgtcgttctttcgagcggcaggcgatttcatgctgttgcttattgcgcgattatttgcgacgcagcatttcgtgcagagtttcgatgatcttgctgtatttgatggaatccgtgaaacgcaaacgcgggaatgcgttaatcatacgacgctgctgcttgttcaggatagatgcggcagtggcctgcatattggcaagaatctcctgcgaggagtccgaccaatcctggaccttgtcttgcaccttgtcgcggaatttgtctcggaaaatgtctttgccccattgcagggaatcaccggctttctccgcatatgcctgcacggtttcgctgaacttcgcaagattgtcggccaaatcgatgatgccaagcactgtaataatggtatccgcgacgataaacgccatgaaaatcacgcacatccagtgcactactggcaaaggaatcatctgtgtaatgcgattcacttcaggctgtatcacatcggtgatgagcacacccagcagaccgaacacaatcgctccaagcaagcaaatgcgcccttgaatgttgaatcggcgatgactgtaatcccaccatcgtgcgtggaatagcttttccatgccccatgacgtgacatattcaagcatgcatgcaccgattgaagaaatgagaaaaaccgcgaagggattatgcagatcatgcagcagcacaatcgcaagaacggctccgcaaccgtagatcgggcagatgggaccattcaggaagccacgattcaccaagcgacgttccgaaacggacacgagaatcgattcatatacccatccggcaaatgaatagaacaggaaccataagaacaggtattccagcatgagcatgctttcgcgccgtcactttccacttgtatgcatattgactttcggcttgtagaagcgctcaagactgaccgtttcccgtgtggcgctgatcttatccgcgacagtcaccaaatacccttcaagataccgaggcggtatcggcgtcaaaggaaacatatgattctcgatgctgtcacgttccactctattgagatggaaatcgcgcacggcattgcgcatggcggtgccaccatgggtgaaaccatgcatacgatgacggccgccatcatgcgcatgccagtcgtaaagaaaataatcgtgcagcaaagcggcgcgaatcaacgaatgcaaatccaccctatgccataagcgcagcctgtcagcgatccatacggccagacaggccacgcggatggaatgagcaaacgtggtgaccacgccatgctggtaacagactctttcgatctgcatatgctcatggcacagtatctcctggccgtgaagtcgaacaagctgctgtatctgcgttcgtgtcagtggcaccgctttgcctttgctatgtactgttgctgtaattatttgagcaatgattccggcgtcttgtatgccgggccgtcgctgacggagttggcgaaggcacgcagctgttcgatggcggttttcgcggaaacgatctgctcgcgcacgcgcagcggagacgtgcctcccttgccattgcgggcggaaacagaaccttcggtggatagcacttcgcgcacttcgggagccttgtcggccggaaggaattccttgaagacctcgatgaagtcatcgtcggccaggtcccacagttcctggccgcggtcttcggcgatcttcacgcatgcaccggaaagctcgtgcgcgtggcggaacggcacaccgttcttcaccagccattcggcgatgtcggtggcgagggcgaaaccggtcggcgcttccgcttcgaggcgttccttgttgaagaccatggtgccgaccatgccggtgaacgcgggaaggagcacttccagcgtgtcgacctggtcgaacacggcttccttgtcttcctgaagatcacgtgcataagcggtgggcaggcccttcagcgtggtgagaagaccagccagatcgccgatgagacggccggacttgcctcgtgcaagttccgcaatatccgggttcttcttctgcggcatgatggacgagccggtggaataggcgtcgtcaaggcgcacgaacgcgaactcctgggtgttccagatgatgatttcttcagacagtcggctgatgtcgacgcctgccatggctgcgatgaaagcgaattcggcgaccagatcacgactggcggtgccgtcgatggagttcgcggttaccttggagaagccgagttcgcgggccacggccaccggctccaagccgagggtgttgccggcgagggcgccggaaccatacgggcttgcatcgatgcgcttgtcccaatcggcaagacgttccacatcgcgcagcagcggccacacgtgggccatgagctggtgtgcgagcagcaccggctgggcgtgctgcatgtgggtacgccccggcatgacggtgcgtccggccttttcggcctgttcggtcagtgttgcggcaaggccgagcagcattttggcgatgacgcggctgtggcgacggagccacatgcggatcagcgcggcgatctggtcgttgcgggagcggccggcgcggagcttgcctccaagctcgtctccggcgatctgcagcagtccacgttccaatgcggtggcttcgtcctcatcgtcttcgatcggagcgaacgcaccggaatcgacacggcgctgcagctcgtcgagagcgtcttccattcgctgcagctcgtcggcggtcaatagtcccgcacgtccgagcgcacgggcgtgggctcgtgagcctgcgatgtcgtcgtcggcaagacgccaatcgaattgggtggacttgctcagtcgcgcgagttccggagacgggccggacttgaaccggccgccccacagggcgaggtgttcaccattggttgtgctctcggtcattgttacttcattctccttgcagatatgactgagggagaggataccagtcaggatggtcctaacggtacgctctcccccattatcaagacgattcggcgtaaaaaactcgcttactcgacgctgttttccggaacctcgatgccattgccgaacttgacgtcgcgggctgcggccacacggctcggcagaccgtagatgtcgatgaagccgttggacgacttctgatcgaagctgtcgccggaatcgtaggtggccagattgtagtcatacagcgaggtgtcggaacgacgaccggtcacgacggcgcgtccgccatgcaggatcatgcggatttcgccggaaacgtacttctgggtgtcttcgatgaaggcgttcagggactgcgttgccggggagaaccactgcgcatcgtagacgagttcggcccagcgcttgtcgatatcgcgcttgatgcggtgctgctcgcgttcgaggcagcagttctcgagttcctggtgggcggtgatcagtgcgatagcaccaggagcctcgtacagctcacgggacttgatgccgaccagacggtcctcgatcagatcgatacggccgatgccctgtgcgcctgcgcgacggttcatctcttcgatggcctgcagcggggtgacgtcgtgaccgtcgatcttgacaggaatgccctgcttgaattcgatgacgacctcatcttcgactggcgggaatgccggatcgtcggtataggagtagcagtccttggtcgggccattccacggatcctcaaggaagccggtttcaatggcgcggccccacacgttctggtcgatggagaacgggctcttctcggtctgcacgatcggaagcttgtgctccttggcgaatgcgatctcgacgtcgcgggtcagcgacaggtcgcggatcgggctgatggccttcagtgtcggatcaatggaggagatggacacctcgaaacggacctggtcgttgcccttgccggtgcagccatgggagatggtgtcggcgccgaactggtgggcggcgcgcacaagatgcttggagatgagcgggcgggaaatggcggaaaccagcggatacacaccctcatatagggcgttggctttcagcgccttcatgcagtactcattggcgaactcgtcgcgggcgtctaccacatacgcttcaacggcaccgcaggcaagcgcgcgctgcttgatggtttcgaggctttcgccaccctggccgacgtcgagggatacggccacgacatccttgccggtgcgttccttcagatatgaaatggcgacggaggtatccagaccaccggagtacgccagaacgagacgattttgatcgctcatggtttccctttctaacatcaaacgttattcatcagtatatgcaatgctctgtatatttatgcatatacggtgcgtcgtgtccactatatggctattcagcctttggacacgacgtccaacagccattgcgcacgctgtttcgcataatcgtcatcggcgcaaatcaccatgacggtatcgtccccggcaatggtgccgagcactccatcgatgggctgcttgtcgatcacacttgccacatactgggccgcgccagacggcgtgtggaccaccaccagattcctagccgccgcgaccgaagtgaccagtcccgaaagcacacgattcatctgctgttccgtttttgcatcaggattggccgacgcgctttcctccggctgtctgcccagcgcataggccacggttccgtcagccaaacgggttttggtggcatggatctcgtcaagatcgcggctcagggtggcctgggtcacttcgatgccctgatccgcgagaatctgggacagctgcgactgcgaggtgacgatgcgcgtcagcaacgcctgctcgatggcgctcaatcgagcggcccgtgtggcaggacgttgcagcgcaggtgtttggtccgtcatcaggccagcaggctttcatctccgcgggccttgccggcaagccaagtcagcagtgccttctgcgcatgcaggcggttaccggcctcatcccaaaccacggactgtggcccgtcgatgacttcggaggtgacttccttgccacggtatgccggcaggcaatgctggaagatggcgtcttccttggcataagacatgagttcggcgttcacctgataatcccagaacggcttggaacggatggcgtattccgattcttcgcccatggaaacccatgtgtcggtgaacacgcagtcggcgccggcgaccgcttccttcggatcggtggtcaccaacacggaaccgccggtttcggatgcgatggcttcggcatcggcaacgatctgcggatccggcagatagccgttcggccctgcgacacgcacgttcatgccggccacggcgccaccaagcagataggagttcgacatgttgttggccgcgtcgccgaggtaggcgatggtctggtttttcagattgtcgacgccaccacgatgctcggcaatggtctggaagtcggcaagaatctggcagggatggaattcatccgtcagagcgttcaccaccggatgggtggaatacttggccatttcctccacacgatcctggccaaaggtgcgccacaccacgccgtaggccatgcggtcaagcacacgtgcggtgtctgccaccggttcgccacggcccagctgggatccggacttgtcgatgaccagcggatagccgcccagttcggcaacgccaatggagaagctggaacgggttcgggtgctcggcttgtcaaagatcaccgcgatgccttgcggtccggcgaacggctgatggtagaaacggtcgttgtggaatttgatggcgagttcgagcacttgcttctgctcttcatggttgagatcgtcatcgcgcaacatgtggcgcagttcaggagttgccattgttggctcctttcaaaatatccagtctgctttgattgccggctatgttcagtcgttgggaagatcagttggaatcttcgcgaggatggagatggcctgatcgatgtcctgttcggtcaccaccagcggaggggcaagacgaagcgcatccggcgccaccgcgttgacgatcaaaccgtgttccaacgcccaattcatcgccgcatgcgcgcatggatgggcaagttcgaccgcgtcaagcaatccacgtccacgcacggagacgaagagcggattgacgcaagccatgatgccgtcacgcaattgctggccacgcgcctcagcgttggccacgagaccgtcttcctcaatggtctccaacgtggccatcgcggcggccgctccgagaggattgcccgcaaaggtggagccgtgggatcctggggtgaacagcgcggaaagcttggcgccgaaggagatcatgccacccatcgggaaaccgcctgcaacgcccttggcgaaggtcacaatatccggaaccactccgcccgcaagatcctcacgctggaatgcgaaccaggatccggtgcgtccgatgcctgtctggacctcatcgatgatgagcaacgcgttgttgtcgtcgcacatctgacgggccttcttcacgtagtcggcgccgagcggacgcacgccggcctcaccttggatcagctccatgatgacggctgcgacaggacctttgccatatttgccgggaccggtttcggcaaacgcgtcatgcaatgcggtctcgtcaccggcttcgacgaattcgatattgggaaccagcggttcgaacgcttctcggatggtgggcttccacgttgcggacaacgcgcccatggtacgtccatggaagccatgggtcatggcgatgatacgcgccggtttgcctccaatggcaggcgatgcgcccggcaaggtgcggccatacagtttggcgagtttcagtgctgcctcgttgccttccgctccggagttgccgaaatacacatgagatccctcgggggcgccggcaagctcaatgagcttcgacgccagttcaatctgcggttccgtggcgaagtagttgctcacatgagcggctttggctgcctgctcgctgacggccttcacccatttcgggtgggcgtatccgagcgcgttcaccgcgatgcccgcaaggaaatcgaggtattcattgccatcgatgtcccagatgtgcgcgccttcgccatgatccataacacgcagcggagtaccgaacacgttcatgtgcacccgggagtactcccccagccacttggcgtcctcgctgccgaggttttccaactgttcagttgccatacgaactcctcatttcaataccgtcttcgggaacgaccatggttccaatgccgtctgtggtgaaaatctcattcaggatggaatgcggtttgcgtccgtcgatgatgtgggcgcgtggcacgcctccatcgatggctctgacgcaggcttccatcttggggcgcatgccgctctccagatccggcaacatgtcgcgtaggttctccacgccgatgcgaccaatcagagaatccctgtccggccaatcggcgtacaggccatccacatcggtcagcacgaccagcttgctggctccaagagcggccgcaagcgccgcagccgcggaatcggcattcacattcaacacttcggtagcatcatcctcatttggagccaccgaggaaacaacaggaatgcgtccggcattgatcaggtcctcaaccgcggatgcgtcgacgctcaccacgtcgccgaccaaaccaatatcggttggcgatccatcgatgatcggcttgcgctgcatggcggaaaacagcgcaccatcctcgccggaaagaccgaccgcgaacggaccatgggcgttgatcaacccgacaagttcacgggaaaccttgcccgtcaaaaccatacgcaccacatccatggcctccggcgtggtgaccctcagacctcccttgaattccgacttaatgcccaaagccttaagcatgtgcgagatctgcgggcctccgccatgcaccacaaccggatgcaagccgacctgtcgcagaaacaccatatcttcagcgaaacaggctttgagatgatcgtcgatcatcgcattgccgccatatttgatgacgatgcgctgtccggcgaattcctcaagccatggcagtgcctcaatcagcacttccgccttttggtcggcgcgcaaatcggtatgcacgtcaaaatggaatccaggtcctttgagttccttggtcattaccgttcaatcagctttcgtaatctgcattaatgtgtacgtattcgtgggtcaaatcgtcggtccagacagttgcttccgcatttcccgcatgcagatcgatgtcgatgtgcacctcgcgcggagtcatgtcgacttcggatcggtcgcgtccggctccgccgttctcacagatacgcacgccattgacgtcgaccgtgactttattggaatcgtagggagcgacttccggcggcacggtacccagcgagctgacgatacgaccccagttcggatcattgccgaagatggcgcatttcagcaaattggatgccgctaccgcacgaccgcaagcaagcgccgcatcttccgtggtggcgccggtcaccttgacacggatgtcatggctcgcgccttcaccgtctccgacaatctgacgcgccaaggaggcagtcgcctgcgccacaagctcgttgaactcgtcgggatccggttcgataccggatgctccagacgcaagcaaaagcacggtgtcgttagtggacatgcaaccgtcaacgtcaatgcggttgaacgacatttccactccagtgttcagagctgcctgaagctgtcccgcgcttaccacggcatccgtggtgatcacgcacagcatggtggccagctgaggcgcgatcatgcctgaccctttgaccatgccgccgacacggaacccattggacccttcaagttcaacggttttcggcttggtgtcggtggtcatgatggcatgggacgcatccgcaccggcctgagcggtatcggcaagggccgcgaacgctttgtctgcgccagaaagcacatggtcaagaggcagaagctcaccgatcaggcccgtggagcagaccgcgatatcgctgtctttggcacctacaagcgccgcgaccttttgggccgtggccttggactgctcatatcccggctggccggtgcatgcgtttgcgcctccggaattaaggatgacggctttcacatgaccgtcggccacgatcttgcgcgtccactgcacgggagctgcgcagaaacggttcgaagtgaacactccggcagccatatccagcggaccgttattgaccacaagagccagatccttcttaccttcgactgcggaaataccggcttccacgccagccgcggaaaaaccttgcgcaaacgttacgctcatggcgccactccaatctttgtcaggcctgcatcttcaggaagtcccagtgctacgttcaacgactgcaccgcctgtccggccgtgccgcggttgagattgtcaattgccgcgaaggccagcaaacgccccgccttacggtcgatggccacctgaatatgggccgcgttcgatccgatgatattggcggtggccggcatgacgccttccggtaaaacaatcatgaaatcctgatccgcatatgcgtcagtccaaacctgcctgatttcagcatctgacatattcaatgctgtatcggttagtttggcggaaaccgaagcgagaatgccacgggccattggcacaagaatcggggtgaatcccagcgtgaactcgtttgccgcggatgcgttctttcctgcagcatgggcgaagttctgcaaaatctcaggaatatgacgatgagtaccgccgacagaatacggtaatgcggaaccgaatgcctcagctgcaagcaaattgacgcgcttcagattcttccctgcgccggagtagccgaccaccagatcggcaacaatatccgccggttcaacaagcccttgggcaatgcccggctgcagcgccaatgtggttgcggtcacattgcatcctggaccggcaatacgcttggttcctggaatcacctcacgctggtgctggtaagaaccatcttcggatatgccggtaatgagctcaggcatgccgtaagtccagtgctcatagaagtcgccgccgtagaactcatcccatgcggttttttcctcaagcctatggtcggctcccaaatccaccaccacggcattcggatcaagctgggaagccaatgcaccggatgccccatgaggcagcgcaaggatgatcacgtcatgcccgttcagtacctccggagtggtgtcttccaccacaaggtcggcaagctgcggaatatgtggcatatgcttgccaagcttgtccccaacggatgaatgcccggccacgcacgtcacttcgaaatttggatgggccgcgaggatacggagggcctcgcctcccgcataccctgtcgcgccggccacggctactgtgtatttggccatgtcacgcctctttccattgactcactgaaaacacattcagcatacactttatgcactacattgcataattatgcattcatttcgtgtcgcatagtggtcattgcgagactatgacaattattaaaagactagaaaacacgccgaatcaggcagcgatcgactcgtctccctgccccgatcccgcgccgccaagcatattctgcaacgtctcgttatacaggtcggcaacggaaagaccatgcatcgccaaccaaatcacggccaaggtgtacaacacattgatgatcaccgcggcgagagccaagccataccctttcatatggagcttcttggtacgccacatcgaaatcgcgccgaccaacgcgggaaggaccggcaccggcatcagcacggcaagcacgagagacatgatcgcataggcatcccaatggccgtatgcgggattctgccgaggatcgttgagatccagattcggcagatagggcatattgccctgctgcggatattggttcggatcatacggattcggcccatacgggttggcgccgtatggattccgttgtccgttcgcattgtacggaggcatcggttgctgcccatttgaagggtattgccccgtttggtattgcatattctgctgctgtacagcatccgcaggttgcggttcaggttcaggcgcaccatacacgtatggatcgtaaccggccggcagctggctactcatcgcaccatattcgggttgattgatctgaccatactccggctgtgaagacgcagcggcatcggaagatgacgaaaccggagcagcatcagccgtctcctgacgttcgtcggtgttggtcggctgatactgctccggttcgttcataatcatcctctgttcttgggaaggtcgggatcaggcgcgcagctgcgcaccaagcttggacgcttcatccacaatacgcttgcggatggcttcgctgtcttcggaagcgagagtcttatccggagcgcggaatgtgaccgcgtaggccaaagacttttcgtcctcgcccagctggtcgccggtgtacacgtcgaacagctcgatgctttcgaggctgcttccagcggcatcgacaataacctgcttgagctcggcggccgtgacatcggtagacaccgtaaaggccagatcctgcttgaccggcgggaaggtggaaatcggcttggcctgcaccggcttgccgctcaacgtggcgaacagcgcggtcaaatccaactcgaaggccgcggaatgggccgggaagcccaacacctcgttgacatgcgggtgaagctcgccgaccataccgacgaatacgtcaccagccatcacacgagccgcacgacccggatgccattgtgccggcacatcttcagccttcggctgatccagcgtgagagctgcaccaatacggtcggagatgcgctgcaccgcctcaacggcgtcagaccaatccactgcgcggcgctcgcccagccaaccggagtcaacggcgttgccggtcagaatgccagcaacatgcatcggctggtccggaagaccggcatcaagcgcggcaagctgctcgtccgtcggcttgactgcacccggcagtgccggaatcgccggagcgttcggatcccacagatacacgtggccgatctcatacagcgacacattctccacgccgcgacgtagattgcgctgaacggtctgtgccaacgttggaataatgtcacgacgcaggaacggacgatcaccggcgagcgggttggcgatctccacgctgacgttcttcgtctcagcgacgtccagcgcgaagttcttgtaatcctcatcgccgacgaacgggtagctcaacgtttccaccatgccgtattcggcaagttcatcggcaacctggcgcttgcgcagctgctcagcagtcagaccgacctgaccttcgaccggtgccggcggcacggtgacgggaatctcgtcatatccgacaagacgcgccacttcctcaaccagatcgcacggctcgttcaagtcggggcgccaacttggaggcgccacggaaaactcgccgttgccgcctcctgcgacggagcaaccgatgtcggtaagaatgtcgctgatggtgttcacgtccgtgtcaagtccggccacacgagccacttccgaagccttgaacaggatcggacggcggttagagacggtattgaagtcggtcgggtgctcgctcggctcgccattgccgtacctaaccatcagttcggcggccatttgggcggctgccggctgcagctggtcgtccacaccgcgttcgaaacgacgggaggcttcggacggaatcttgtgacggcgtgcggaacgcgcgatcgacacctgatcgaagtgcgcggattccagcaggatgttcttggtttcggcagtgacctcgccatacatgccgcccatcacgcctgcgatgccaagcacacgggagccgcgttcgccattcggggaatcggtgatcagcagatcctcgacgctcaaatcgtgatccttgccatccaacgtggtgagcttctcaccttcgttggcgcgacgcaccacgatcggtccttcgatcttatccagatcgtaggcatgcatcggctgtcccaagtcgagcatcacgtagttggtgacatccactgccaaggagatggaacgcatgcctgcgcgggtcaggcggcgacgcatccaattcggcgtatggctggccggatcgaagcccttgaccgcgcgagcgtaatagcgatcgcatccaaccacaccgtgaatcggattattgtcgtcgacgatcacttcgatgtcggtcttggtgccttccggcaggcccttggtgatcggcgccttctcgttcagggcgacagccggatcggtgtaggccgcaccggtggaatgatggtattcgcgagacacgccacggtatgagaacgcgtagccgcgatccggagtgatgttgatctccagcagcggctcgtccaagtgcagcaggtgcatggcgtcgtcgcccggctggagcttctcatactcttccggggtgaagccgtacttgcgaagcaggatgatgccgtcatggctatcacccaatccaagctcgcgttcggaagcgcacatgccgttggagatatggccgtaggtcttgcgcggttcgatcttgaaatcgcccggcagcacagcgccaggaagcgttacgacgaccttttcgccggcagccatgttcggcgcgccgcagatgatgccgcgcggcaccttgttgccgttctcatcggtctcgttgtattcgtcgccgacgtcaacgtggcaccagttgatgatcttgccgttcttctgcggttccggagtggcgtcgaccacgtagccgacgacgatcggaccgaccagctgggaggtgtggatctcttcctcttcgagaccgaccttcaccagatctttggcaagctgttcgtacgtaaggccttccggaacctcgacatggtccttgagccaatcaatgtcaaccattggcatgggtcaatcactcccccatcacaaactgttcgctgaatcgcacgtcgccttcgaccaggtcgtgcatgtcgttgatgtcgtggcgcagcagcagggtacgttccacgcccacgccgaaggcgaagccggtgtagacctcaggatcgaggccagcggacttcagcacattcgggttgaccataccgcagccgccccattcgagccagcctgcgccacccttcttgtcagggaaccacaggtcgagttcggcgctcggctcggtgaacgggaagtagctcggacgcagacgggtcttggcttccgggccgaacatggccacggcaagcttatcgagcacgcccttcaggtcggccatggtcagatgcttgtcgaccgcaagagcctccacctggtggaacaccggcgtatgggtggcgtcgagctcatcggtgcggaacacgcggcccgggcatgcgatgtacagcggcacgccacgggtgagcagaccacgcacctgatcggaggaggtctgggtgcgcagcaccatgttggatccgacgaatcctgcggcgtccttggcctgattgcccttgacgtagaaggtatcctgcatctggcgtgccggatgatcggggccgaagttcagcgcgtcaaagtcgtaccattcggtttccacttcaggaccgtcggaaatctgccagcccatggaaatgaagaagtcttcgacatcctccatcagtttcggcaacggatggcgcgcgccaagcggcttgcgattgaccggaagagtcatgtccacggtttcggcggcaagcgcacgggcctcttcctcggccttgacctgctgttccttggtgccatacgcacgaccaaagtcagcgcgcagcttgcccatgatcttgccggcgtctttcttctggtccttcggcagcgcgccgatggccttgctggcctgcgtcatcgcggattccgctccggcgtactgcgtcttgatggctttcaattcctccatgctggaggcgttttcgattttcgcgatgccctcggcaaccgcatcggttaccgcttgggcgtcgaataccgcaccttctgccacgagatacctttctcatttcccgtttgttttacgcgaaaaacgcgcaatttcaacgttttccgactttacattctttcaacatgactcgacatagccaagctcagcagcattaccgccgaactggtgccgaggttcaaggattccgctttgccatagagcggtatggacacgatcctatcggttcgttccaaaacttccttggtcaatccgcgtgcctcattgccgaacaacaccgctttggcgccggcaagcgtttccggcgcagcgattacatccgtcagggattccggctgccgggaatccgtgccatatacatcggccgcatacactgccaactcgtgagtatcgcaccatgcgaagaagtcgtccgttcccatggtcagaatcggaaggtggaacagtgatcccacggtggagcggatcactttcggattgaacacgtccacgcagtcgtcgaccaataccacggcggagcagccggccgcgtcggcggaacgaatcacggttccggcgttaccgggatcgcggacctgccaaaacgcggcgaccatcgcatgctcgtcgaaatcgtccggagcggcggacgaatcgaggaaagcctgcatgtccgcgacggcaagcacgccttgcgcgtcggcgctcatacggtgcatcaccgcatgagtgaccttgtgcacatacacgccggattgcatggccttgcccgccatctgcgcgacgacaggtgtcgcaaacgaggcatcgggctgtgccgactcgacctcaacgtagagatcctcgacaagtcctggatgccatgtcagcagctcgcgcaccgattgcgggccttccaccatgaaacggccagaccgtttccgcccttttcgatcggcgagctcggacacgcggcggacgcgctccgacttggggttcgcaatgacttcggattttataggcatacgcgttagcctaacaccattgccgcaatgaatgccccgtccatgtcgcgtttttaattcagaaaactttccagattcattccatcagcagtcgcagcagaccagccagagggcgcagtccggtcgcgatatgcagggtccgacaaatgattccagcgactctgccggctcgcaggattccaataccgataacaattctccggattcgcagcagtccggcaacgcacagagcgatgccccagcgctggcaaaaccactatgctgttactgatttccgggcttgcgaatcccacagagggaaaagtgttgtgcaacggcagcgatttgtcacagcaggatcgtcacccttcgccttgccccgtattcgacatgtcatgaatttggcaggtcgggtacggggcttttgcacatccatgaaagatatgcacagcttgcgagtgtgtctcaccgctttcgattggtttgcgaacatcggttcgttacactgattatctgacttattgtctgattacggttgggcgcgcgacatcatcccatgaatgttggaggtacaagcatgaacgtcacggtgtatttaggagctcacgaaggcaacaaccccgtatacaagcaggccgtggcggagctggccatatggattgccgagaacgggcaccgtttggtgtatggcggttccaacgaggggctgatggcagtcatcgccgacactgtgcttgagcagggtggcgaggtgaccggcatcgaggcgcagatgttcgtggacaagggtgtcgcgcacaagaatctgacccagctcaccatcgtgccgaatatcaccgaacggcgtactcgcatgatcgagcttggcgacgtgttcatcgccttccccggcggcacgggaacgttggaggagatcagtgaggttgtgtcgaaggtttgccttgaccagttgacgcagccttgcattttctacaatctcaacggtttctacgatgacatgaaggcgttgctgcagcgcatgatcgacgatggcttctccacaggggaacgccagcatggtatctatttcgcttcggatcttgccgagatagagcatattatcgccatgcacaaggcataggcggctcagtaaggtcgtttttattcgacaggtttttcaagaaaacggggacgcccaaacgaccctcataatcggccggaatatcctccaaccggcccatcacaaccaacatgcatccacatgccccgcagcgcatccggtcaactccgggatgcttcgtttgccgaacttactgatcggatggaacccgtatccgtcggccacgcgaagaatggatttgcgttttattgtctgcatgatttacagtttcgttaccatgaacatcccgtttgtcctgctgtacattttcctcggcggcgtgctcctgttctccgcctattcgctctgggagaaagacaaaaacaatcggaggtaatgcagaatggacagcaaggcacttctttccttgaaccatttaagcgtctggtacaccgcagatcaccccttactttctgatttgcactggatctaggggcagcggaagatcagtcatttcagtatttcacattccgggaatatctaacgtatgtggcggcgtcctatggtgtcccgctgccagatgtgtctgacctcataaggggatttcactttaaggactatgccaatgttcttctatcggtcgcggatcttcttccactgcctgccatagcgcttgcccgcggagtagccgcgcgtgaaatgcttgtactgccgctccgcttccttgcgatgcttctcacagtattgctcgccgtcctcgcaaaggttcgggcagccggggtggcggcaggggcgtcttggttttctcggcatgcgtgccgcctcctttcggacaatagaaaagccccgaaaggattgctcctttagaggcttgaaataggtcgtccggaccgcgttctccttctttcggcttgttatctacgatgggcgccatgggtgcttatagagagtggttcgcggtaacgctacgcttgcaagacggttgaaacctgagtatttatttaatccagttaggcgtagtgctttgtgatgcacattggcaataaaaatcttgaaagacgataagcggctatgcgggaattactacatgaggatgatttcctacgatataccctgcagagcaaaggcaaggtatatttgtgggaaacgagtaatcaatatgcatgaacggcgcatgtcaccaaggagatggtttcgacatggacaaggatttccttgcgatttttaatgccataaaggctgatggggcgaatgcagactacaccaagcgcggcatcgatccgctctactccgtcggggctggcgctcgcatcgtggtcatcgggcaggcaccaggcgcggtggcggaagagacgcgcatcccctggaacgacaagtcaggagagcgtctgcgcgattggctgggtgtttctcgcgagacgttttatgatcctgagcgggtggcgcttctccccatggacttttattttccgggacatggcaggtcgggcgatctaccgccgcgcaagggattcgccgagcagtggcatcctgcactcttggcgctcatgcccaatgttcggctcactgtgcttgtgggcgcatatgccgtccgcaggtacctgcatctcaagaattcggacagccttacaaccgtggtgcgcgattatgatgcctatatcggccggggattcttccctttggtgcatccgtcgccgcgcaaccagctatggatgagcaggaatccttggttcgaggccgagaccttgcctgcactcaaggcacgggtcaacgcggcgcttgaacagaggtaagtggttacgaaatcatctgtgacgataacttccagccatacaaggaggttcattcatgcagagaaggacgttggggactcgtgaggcgcttgaaggcatcctcgaagatgccgcgacgccaacgagagcgttcgcgagtgactatggttatgacctcgtcagtcttctgctgcccggtgatgaatgctcgtatgtgatgggcaacccgccgttcatcggccatcagcagcacacgcagcagatcaaggatgatatggaactggtgtgcggcaaggccggaggctcgctggattatgtggctggatggtattttaaagctattgatttccttgacgggaatccctccgcgcaattcgcgttcgtatccacgaatagcatcacacaaggccagcacaagtcgccccgctattcaagcatgtggtcgaacgagggtggcgtatccggttcgctcaccgtacgttctgctgggacgctcagactacggacaatgcgaacgtgcatgtcgtcattgtcggattcgacagaggcacaaacgctcctgcgttgtatgaatacgacgacattaacggtgaacctgtggaagcacgtccggctcatatcaacggttatttattggatgcgtctgatgtgttcgtggaggcgaggagtcagaagaccggtccgtaaggtctttgccgtcccggatggaagaaattctgtaggaataaggagagcctccccaatttggagaggctctccttataaccaatctggctaccttctgattacccttggagtccaaaacagcttgatttcaagggaaactgggtataggcctcagatgtggaagtacagctcgtactccagcggggtcggagccaggcgggcctggtcgatttcaccacgcttgatgccgatccaggtttcgatcaggtcgtcggtgaagacgtcgcctgcggtgaggaagtcatgatcttcctcaagggcatccatggcctctgccagggagctcggaacctgcttgatacctgcgtgctcttccggcggcagctcgtacagatccttgtcgaccggctccggaggctcgatgtggttcaggatgccgtccagacctgccatcagctgtgcggagaaggcgaggaacgggttgcaggacggatccggagcacggaactcgatgcgctttgcagccggggaggtgccggccagcgggatacggatggcggcggagcggttgcgtgcggagtacaccaagttgaccggagcttcgaagcccgggaccagacggtggtaggagttcagggacgggttggtgaaggccagcacggaggaggagtgcttgatcaggccgccgatgtaccagcgggcaaggtcggacagaccaccgtagttcttctcatcgtagaacagcggcttgccgtccttccacagggactggtggcaatgcatgccggtgccgttgtcgcctgcgatcggcttcggcatgaaggttgcggccttgcctgccagagcggcggtctcgtgaacgacgtacttgtacttcatcaggtcatcgcctgcgtgctgcagagagttgaagcggtagttgatctcctgctggccagcgccggcgacctcgtgatgggaacgctcgaggatcagaccgaccttctgcaggttggcgaccatgtcgtcacgcagatcctgggtgtggtcgatcggcggaaccgggaagtagccgcgcttgacgcggttcttgaatgcgatgttcggggtgccgtcgtcttcggtgtcgacgccggagttccacggagcttcgatggagtcgacctcgtagaaggagcgctgcatgctgttctcgaagcgcaccttgtcgaagatgaagaactcggcttccggagcgaaggaagcggtgtcggcgatgccggtggacttcaggtaggcctcggccttgcctgcaacctgacgcggatcgcgggagtacggctcgtcggtcagcgggtcgacgatggagaaggccacgtcgagggtcttgtgcttgcggaacggatcgacgaatgcggtggaaacgtccggcaccagcttcatatcggattcattgatggcctggaagccttccacggaggagccatcgaacggcatgccgtcggtgaaggcgtccttcaggaattcgcttgccggcacggtgaagtgctgctgaacaccgatcagatcagtgaagcgaacggagacatactcgatgccttccttgttgataagggcctcagcatcagccttggtttcaagtgcagtcacgggaccgctcctttcgaataagtaacttacaggctcttagtctaggaacgcgcgtttcgctcactcgccaattgggttacgagaatgtttcgtaatgacatattcgaaggatgatttcgcgaaaaactggggttcaattgttacgaacgctcgtatttgcctctgcaaaaccgttcaatttgtggacattcgtgtcgtcatgtcgcttgcgacgtccatttcttttctcaaaaaccttaccgcatgcgcgcaggccagcggaaggtaacggagatatgaaaaaaggaacctcgataacgtgttcatcgaggttcccatatgtaagccggctttacgattccaggaaaatcagcggccacgcatagcacgacggctgatgcgctgcgggtgcatcgggtcgacgcccttcggaatgcccatgccgttcttcatctgcagagtgcgcagacgctcgttgaggatgttcagctcggtcttggtaagcatgaagcggctcttcggatggatggcggccaccaacttgttcttgtggtgggtcggcaggtagctcttgcatttgagcacggtcttgcgcagattcttcaggctcgtctgattcttgccctggccgacgtagatacggtagacgggaatatcggaaccggcggtcacacccttgatattctgctcctgacggtccatggcacgcttgacgcgattgtaatcgccctcgccgagcagataaatgccgttgtaaccggtgccgcgccaaatggcgtctttggtcttcggatcaacccacaccggctcctgcggaaagttgaagccagccttgttaatgttgccgagcacgctgatggcagcaccctgacgcccttcaagcttggcgtatccgactttgtcggcacggttggtgagcatcatggtggcgaacagcaggccaagcatgacggccaggatcatggatgtgatccatccaatcaccgaccacttgaatacgatgccaagtaccacgaacacgatgataggcgccacgaacacgcctccgcacagccacggaagagccttgtcttcggcatgggtgtacttgaagatctgaatgatctgtttgatggtgctctgcttcttctttggctcttctttgtctgccatcgacttcctcacttggttatgcggttactcacactggaacggtagtttatcaggaaccatgccatatcgcatgatttccgctgtttcccctttattgacgaggattatcgggtgtgcaaaggcctgccatccgctttgagcagcgcctctccgaacgattcgctgaacgtaggatgcgggtgaatgagctttgccgcatcggcaagcggtacatggttaccaaccagctgttcggcttccgcgatcagatcgctggctatcggactgacgatgtgcacgccaagcacaagaggaacgtcgggagcgtcagccatcgcaccgctgacgatggtcatggatccaccctccccactcatgagcatacgcgagttggacagcatcggatatgcggtttcctgcggatcgacaatagtgtcacgtgatttcgcctcgctgagcgtaagcccgacgcttgccgcctcggggaaggaaaacacgacttgcggcacggtttcgtcgacgacaggtttgggatcaagtcccgcgatggtttcggcgatggtgatgccctgctcgaacgcacggtgcgccaaggcatgccccggcgtgatatctcccaaagcccatacgccttccacgttcgtgcgcccgtacgcatcggtcagaacatagccacgttcatccaatgcgatgccgttggaagcgaaccagtcggcatcggtgttcggcatgcggccaatggcagcaagcaccacttcgccatacgcggtacgctcctcaacgtcatcaccctgcctgtagtgcacggtagcacccaagtttgctccggtgtccacatgacttaccgacgtgcgcgccaccacattcacgccatggcgtttgagctcacgtgtcaacgtcatcgaagcccgcctctcccaagacgacagcacgcgatccttgcgaatgagcaaggtcaccttgcatcccgacgcattccacaatgatgcgaattccaacgccaccgcgccagcgccgataatcactgcgctggatgggaacgtgtccaattccagagcctgcgtcgaatcaatcaacgctccggaaaacggatcgtcaggcaacggcagcgggcgcgaaccggtcgcgagaacaatatcgccgcctgagatcgtaagttccgatcctacaagttcccctactcccgccttgatggaacgcagaacctgcgtctctcccaaggccggcgcaacatgcacctcatgaccatttttcagctgtgcctcgccacggaacacggtgacgccacggtgcgacagcaatcccgccaatcccttcgtcatcgtctccaccgtggacatacggaagtcacgtaacctgccgaagtcaatgctctgcaatgcgacattgacgcccatacgctccgcctgacgtacgttctctacactatgcgcggccgtcagcaacgccttcgatggaatgcacccgcgattgaggcaagtgcctcccaacgtgtcgtcgcgttctaccaatgccaccgttttgccaagttgggcagcgcgtagtgccgtggaatatccgcctggtcccgctccgatgatgacgatgtcgaaatgctgttcagtcatgcctgtcctcgttgattcgtgcgttacaactggttacatggtaatggaaaagccgccggttttcgccgacggcttgaaaaaacgatggccgcgattcccggcaggagccgatcactccggccagtgtccacgcttatcgtaacgcggcttcggcagacgccaacggcgcatctggatcgcacggctccacgcataggaaccagaacgcatgcccttggacacggattgctcgccgaacttctcaatgagtttcttcttgagcttacgccacatgatcaccacgtcaatgatcaccgcgaacaggtacacatacatgagcaccatcaacggcaatgccagcgcaggccactgatatgttacgaaaatcgaaccgatcagaatgacgaacgcaaccggaatgaagaactcaccgaggttaaaacgagcgtcgacgtagtcacggatgtaaatgcgccatggcagacgctctgcctttggcatgtggttgatgtcgcccttctgcatggcatcgtactcggcgttctcacgctcgcgcatacgcgccttggcggccttacggctcgcctcgcgatccttgggaaccaacgggcgaagattctgcgcctgagcatccttgcgcttcggcgtcggacgacccttgccggaagtggtttccgcaaccttggtctcgacaggctcctgcgccgtctcttccttcttgttaaacaaactcatgcctatagagcgtaaagtgacgtatcgacgccttggccctgccctgtcaacaattggacgtgccgattgagaccgatacaatggtcattcgttacacgcatatgatcacgctgcgttgttgtatggcagcgcgtctttgtaaggagcaatatggcagctttacctgtcgaagaagttcgatcacgagtcgaagcggattttgaccgcatcgtcaacgtgcttaacaagaaaatcgcattacagtccatttcggcaaaaggcatcaccgcggatcatatgaaacgatccgccgaatttgtggccgaagagctcagcaaggtcggcgtaaacgcccaagtggtgcagtcccacaatcctaatggcaccccgggcgcttgggaagtcattggttcgaagattgtcgatgaggatgcgccgaccgtgcttctgtacgcgcatcacgatgtacagccggtacccgacgccagcgcatggaacaccgacccgttcgtcggcactgtaatcgacacccgcctgtacgggcgcggctcggccgacgatggcggcggaatcgccattcattccggcgcattgcaggcgctcggcgacgatttgaaggtcaatatcaaagtcttcatcgaaggcgaagaggaaatgggatcgccaagcttcattcccttcatcgaggagcataaggacgaattcgattccgatgtgatcatcgtcgccgactcgggcaattggtccgctgaaatcccctcgctcaccacgtcgctgcgaggcaataccgatattgacgtgcacgtcaaggcgctgcatcatccggtgcactccggtcagtacggcggaccgatcctcgatgcgaacacgcttgcctccatgctgatcgcttccatgtatgacgagcatggcgatttggtggtaccgggcgtcgcctcagaagatccaatcggcggactgcagcgagatatggatgaggcaaccgtgcgtacggacgccggcatcgtcgattcctaccgtctggccggcaccggttctttggccgcacgtctgtggaccaagccgagcgtgaccgtcatcggcttcgatgctcatccagtggagggatcgttcaacgtgatctcccctgaaacgacgttccgtctcagcctgcgcaccgctccaaaccagcgtccggaagaggctcaggaagcacttgccaggttcatggtcgagcatgctccgtttggcgccgaagtgtgggtcgacaagcttgataatggcatgggttgggccatggatccaaatgccgaggctaccaaagacgccatggacgccatggaagaggcgtttggcgtggctccggtcaataagggcgaaggtggctcgattccgttcattccggaattgcagcgtattttcccggacgcgcaggtactggtcaccggtcccgaggatccgaaggccaacgcgcacagcccgaacgaatccatcagtcttcccagcctgaaaaacaatgtgatcaccgaagcgctgctgcttgacaagcttgccaagtagcggatatcacatatcttttgagaaaaacaacgggcaaatgcgaagggcgttccattccatacaacgaatgaaacgcccttcgcaaatccgccgcgcattcaacaaacctcgtactgcgcagccctgctccgattaattgccagtgccggtaaaagcccaatgccagtaaccggtgaaataagcgcaagacaacgcaatcactggcactgccacacaaatcgcataaaacagccagtcgacggcgttcaaacgtgattcccgggcctgactacgtggagcatccgatccgaaagcacgcgcctccatggcggtggcaagcttcgtgccgcgtcgaatcgacacaaccaataggctgaacgcttgggaaaatacgcgcttgatggcgctaccgtcgcctagtccacgagagcggcgggattgcccaagcgcacgccaatcatcctgcagcaacgtgaacatgcgcatgccagccaaaccgccatatacgaatcgtgacggcaaatgcagaatctgcaccaaaccatcggccagatcggtcgggtcaaggccaagcgcgaggatcacgccgggaacggcaatggccgccacacgtaggaacgtggccaccgccaaatacaacgatccctgcgagaccacaatgacattaccaagattgaccagcacggcaccggaggttttgccatacaatgacacggaaatgaagcttcccgaagctgcgacccataccggccaggttttacgaagcaccgtccatggagcgacgcctccaatccagagcagcagcatctccaacgcaaacgccaccgatgcggaaaccacatccaacgtcacgaacatgggaatgcacaatatcagcgcaccgatgaaacgactgaccggattaatcttcgctacaaaccatgacggcgacgccggcttggcgtcatcatgacgttccctatgcggcaccacgctgatagttttcaactgttccatctcactccccctcgcttacgagaatgcgacgcgcacccagcgcttcgatcaacggctcgtcatgagtgaccatgatgacggaacagcccgcgtcgcgcgcgcccgctatcagcctgaccatttccgtccatgtggtgaaatcctgaccgaatgtcggctcgtccatcaccaacaccttcggcgccgcggcaagcatggacgccacggaaaggcgacgcttctcgccgccggataacgtgaatggattggctggggcgaaccgcttgagattcagccgttctagcatcatatcggcgatggcgtaggcctcgtcatcggttttccccatggatttaggaccgactgccacttcgtcgcgcacgctggacgtgacgaactggtgttccggctcttggaacaccatgccgattcgcccaagaagatccctgcttttccatgtgaagacgttgttctccctatgtgcgggaaccatgctttcatccatacttacccgaccggaaatcggcttgagcaagccagccaaagtcaaagcgagcgtggattttcccacgccgtttttgccggtcagggcggtaatctcgccggcatggaacgcgaggttcacacgctcgccaagagcgaattcacgtccgaagctgagatcctcggttcgcagaacaacatttcccgacgattgattggattcgggaatatggctttcgacggtgcgccccggaacccaggcaccaccttttgtcaataccggcgccatgctgccaaacacttcttccggagtgccgtcggcgatgactccgctgacatgcgaatcggattccggcttaccaagcacaatgacacgatccaccaaatcaagccatacgtcgatatgatgctccaccaccaccaaggtttcatgggttcggtcaagcacaccacgtaccgcatcatgcacttccttgacgccttccggatcaaggttggcggtcggctcgtcaagcaacagcagcccgggatgcatggcgagtacaccagccaaagccagacgttgacgctgcccgccagaaagcctgcgtgtggaacgatcgagtttcatatagccaagtccaacaatgtcgagtgatgaacggaccctgctccaaatctcattttttggcagattcagattttcacaaccaaaagcagtatcatctcccacacgttccagaatcgtctgcgcatcgggatcctgcaataccaatcctgagcgcccacgcgaatgacgggcatccgttccgtcaatcagcagctcaccctcgagttcgccttcatcatcaccgccgagcacgccggcaagaccggccatcaacgtcgattttccggcaccggaagcgcccaacagcaacacgcgctcccccggctgtatggtgaaatccacatgccttaacgcaaaatccttacgtgaggcatgccgccatccccaatcgcgcgcgaccaccccggctgcggaaaacggttttcctgcatcagtacccatgaatcgttctttcattccttttgcatttgacattcgcaaggcgaacacgcatcaaagaagtcccgtatccactcaccgtgaatgcgatacgggacttcacaaacgaatcgtcagaccagttcctgcgtgcggccggattcgaaacggtcaagcacgccggttttggcgatggccacctgtaggaaatacatcaccatcccggcgagcactgcaccggaaatgatggaggtgcctaggtagatactggcacgcaccgtgctccaggccgggttggtgatccagtagtacagaccgcagcctatacctgcgagggcgccggcaatggtggtggacagcaggtcccacttcctgtaggcaaagactgcgaagccgatttccgcgccaaagccctgcatgatgccgacgatcagtgagccgccgacaccccactggttgcccatggtgagctcaagcgcggcggcaagggtttccgcgaacaacgcggcaccaggtttgcgcacgataatggccgccaaaggacctgcgaacagccaaaaggcgttaagcaatccttcaaaaccaggggtcaccgctccgaagagagccagtggtgcggtacagacaatgtcccagccccagaagatcacaccggacgcaacggcaatgatggcagccacgacaatatcgactacacgccacttgttgttgtgcttgcgcactacggaagactgcttttcttcaatcataggatatgtgcctttctctctttgacaaggcacgggaatggagagacgtccgtgcgccggcattacccggtatacgttcatacggtcgaagcgtttgcttcctctcagccatacggcccccgtgtctgcgcttgatactacacaaggcacaagattttcacaagggccgtttcattttcgcttcgtttccggtatggaatacgctcggttttttgcaatggcctgtcttcgcgggtttccctcccatactgaatgcagtacgggaacacggttccatagagttttacaggggcctgcgcatcaacgattcagctaggttcctgaatgtctcgccaatatcgtcggcacgtaatgagccatcctcattcagcacggccggacgtccggcctcaccagtctccctcaattccggttccaacggaagctgagctagcaaaggaacgtcataaccgaggctttcggtcagctgttccgacacgcgcgcgccgccgccttcgccgaaaatccgcagacgttcacccttgtgctcgtaatagctcatgttttccacaacaccacgcactttcatcggcacctgcagcgtcaccaggccggagcggaccgcgatgtcggatgcggatggctgcggcgtggtgaccaccaccagttccgcgttcggcaaggcctgggccacggaaatcgccatatcgccggtgcctggagccaagtcaagcagaagcacgtcgggctcaccccaccacacgtctgaaaggaactgttcgagcgaacgctgcagtctcggccctctccaaaggatcgcgcgatcggcgcccgcaaacatgccgatggaaatcaatttcgttccccaagcggtgacgggcatgagcatgccattcagattggtgggttgcgcgtgcacgccgaacagtcgcggcagcgagaatccatagatgtcggcatcaatggcagccgtatcataaccgagcgccgcgaaagtggcggcaagattcgcggtgacggacgatttgccgacaccgcccttgccggatgctatggcgaaaatacgggttttgatgcccggcttgttgaagggattctgcttgcgctcggctttgagaccggcaacgagttgggtgagcttgtcttggctcatagatccgacttcgatgcgcggcagcagcgttgcatccgggtaggatgccaccgctccgttgatctggttggtgatggtctgcgataatgggcagccttctaccgtcagttcgacctccacacgaacctcataggtgttcgccttaccttccaccggtatcgcatcgatggctgcgatcatgcccagatcagtcacagatcgacccagttccgggtcgattactttgctgagtcgctcatagatgcgcgcttcgatggtgcgctcgtcggtcatggttcctcctttagccgcgtaccagactagcgtctggagacgcggcatgccagagctttcttgcgattacgttgccagtttgacgtgccggtatcacaccgttccattttccagcagtattttgaactggtcctcgtttagcatgggaacgcctaattcctctgctttggcggctttggcaccggcgttttcgccaatgaccacccaatcggttttcttgctgacggatcctgaggctcttccaccgcgggagataatcgcttctttggcggagtcacgcgagaagtcaatcaacgaaccggtgacaaccactgttttaccttcaagcgtctgcggtagtgtactgatttcaacctgctccgcaccgactccagcagccttccatgcttccaacaccgtgccgcgccaatcgcctggttccttggccgacgcgaaccacgtgaccaccgattccgcgatctccggaccgatgccgtctatctgtgacagttcgtccacactggcgcgttcgatggcgtcaagcgatccgaacgtattggcgataacacgtgccgtaggaggaccaagtcgcctgatggacagggccacaagcacacgccataagtcggcgtgacgtgccttgtcaatttcgtcaagcattttccttgtgttttccgcggggcgtatatataccggctgcacgctggatgctccggaacgcgacaccttggtttcctctcggaccaccatagcatcctcaggcacatcatatccgggatattccgcggatccatcgacttcgtccttacgctttctcgccactgtcggagtcgtccaaaacgccggaacctgatgccacaggcctgatccgccgatacgtttgcgcgtttttttcggtttaccgttcttgccgacggtttcatgaatttcgatgattggcgcttctcgccatacgcgaacatcctgcaaatcggaggatgtcagcgagaacaggccggcctcgctggacaacaccggcgtttgccgggccggcagctccagcccttccaccggctcgtacggttctggctcctgccccggtgccaccacgatttccgtgatgtccggcgcgtaggtcgccaccgaatcagggcgatcctcttctggattcgtcaacgcgatggccgattggtcacccagatgttcgatatcgaacgcctttctggacgccaggttgatgatgcgttcggttaactgcgccgggcaggactccacgttcgggcagcggatgtccttgtccccctctttggctggagcgagttgtgccccacagctcgggcactgcgaaggcatcacgaaacggcgcagctggtcttcgtgcccttccctacgctccaacactggacctacaagttcgggaatcacatcgcctgccttgcgtaccacaacggtgtcgccgataagcacgcctttacgttccacctcgaacggattgtgcaaagtggttctcgacaccgttgaacccgcaacatatacgggcttcagaatagccaccggtgtcacgcggccggtacgccccacttgcacggtgatgtcaagcaactccgtgttgacttcctccggcggatacttgtaggcgatggcccaacgtggcgcacgcgaggtcgcgcccagcgaccgctgcaaccccagatcgtccactttcacgacgatgccgtcgagcgcatgctcgatgtcaccgcgatgctcgccgtaataatcgatcatgtcgagaatctggctgaatgtggtgacctcacggttatgtggcgaaacgggtatgccccacttcttatacaacccatacgcttcggattggttgttgaccgcatcatggtcggcaccacgtttggcgccccactggagcgttccaatgccatgcgcatagaagctcagccttctggtggcggtgatgcgcggatccttctgccgcaggcttccggcagccgcgttacgtggattggcgaaaggcgcgcgcccagcatcctcgttttctttgttgagcgtgttgaaatcgtcccatcgcatgaagacctcaccgcggatctccacgaattcgggaatgtcttcttccggtcccgcaagattctgcggaatggtggagatggtgcgcacattgagcgtgatatcctcgccgatcacgccgtcacctctggtcagaccttgctcgagcacgccgttacggtagatgaggttaagcgcaagaccgtcgattttcacttcgcatgtcatcggcaaaggcttcgtctcaggccaatcaagtccccgaataacaccgtcgtaccattcatgcagttcctcaagcgaaaagacatcgtcaagactcatcatgcgagacgggtggcgtaccgatgcgaaatcattggagaaggtgcctccgacacgatgcgtcggcgattgcgcggaatcgagggatgggaactgggcttccaacgcctgcagacaacgtattctcgcatcataggcggcatcggacgagaccggcgcgtcatcgatgtagtatgcgatctggtcggattccacccacgccgccacacgcgcccacaatcgagccgcggcttcagcactgatggacgagacatcaagtcgggtcaaccgcatggcgtcggcatcggttggctgcaatgcggcgatccagcgttcactgcccggcgcatatgagctgactcccccgtcgggaaccacagcggttgacgcggagcccgtatcgccgcccatttcagaagcgtcaaaatcccatgcgagttgttcggaatcgtcatgccttgtcattgtcattgccttgtcactgtcttcaatgttttgccggtcagagccgccatgcacacattatcgcacaaatgttcgatttactgcatcgccaacgtctgtttggcgcactgcggaaagcacgccgttcagttgttcaacgacctcaggaactgcatctgcaccacgtcggcaccgtcgcgctcctcgtcatccatccttgaagcggcaaccgaaagcgtacgtgccggcacgaacatgccttcatccacacagacccgcgcggccttgcgtaccaaggatgcgacctgggtattgggccataccggcagtcccgcttgggtaagcacgtgcatggcttccggaacgtcggtgggcaccggaatgcattgcgattgcgcgcgtccgatcaattcctgcagctcgctctccagcatggcgattcgcccgggggcaatctcctcgctcatgatgtacgcggcggccgcgatgtcgaagtggtcgcacatccattccgcataggcgagtctgtaataggcgaacgacgcatcctcacggtcaagtgcgacgtgcaacgcgttgaggcaagccgctctggccggatcccaatcctcggcgcgcgccagttgaaccgccagcttgagatgggaaagcgggtaggccggcgcatatcgcaccatcgcattgagatgcggcaacgcggccttcacgcctttgacctgtgcaagcacgtcggcgagttccatatgcgcgtagaacagattgtccggaatcagcacggtccgttcgccttccgtggcgaacatgcgattgtagatgacgcgttccgcatacgagttgaaataccgcggcacgcccggattcgaagcgaacagtcggtccattcgctccaacgccgcttcggccagttccacgctttggtcgacctgtcctgagaacagcaggtctctcgccttgatgcgttccgcgtcaagctcgtcggccaagcggaaggagaagtccggagtgtctttgccatcgatgagcgcactcgtcacctgcggagccaacgacgtcaattccgggtcggcaatggtgttgatgacgtccatggcctgctttgccttggccaccgattccagatgggagtcctgcgcgattctgtggaattcgccaaccgcgcgctgcagcaggtcgacgcgctgaatggacaaccccgacatgtcacggcagccgaacagctgtgccgtgtcatggtcgaatatggcgtcggaaagctcaggctcctcctgacttccggatggggagaaacgactatcgcgcaaatcgaacgtggcgtccactggcttcaatgcgccgaggccgtccacatccatttccgcatcgaacatacggtatgtgcctgttggatcagacaatccgcactcgcccagacgctccatgaattcgcttctggtgaaggtgaccgtcaccagattgcgtacggtcggattcttgcgaagctggcttaatggatcatcaccattcccatcgaaatcgccgaagccgatcagtcccgcgtcaagagcgccatcatgcacgccctgtgcggaaccgtcgtccatgctagaggaatcgtccgcaatctcgtcgggaaccgcgaacgtcacttcgtcgaagtcgatatcccgcatcagatcctcgaattggctgttcaacgcatcatccgtatcctcggagttgacgccatcaacgcccatgtcggcggatctcggcgccaccggacgggacgggtctccgtggaaatcgccgtccttcggatcggccttggacccagaaacacccatatctccagtacgaatgcgttcgaaagccgccaaagcctcgctcatcagctcgctgatggcggaatcctgctcggccacggcctcttccaaaccaatcgaatcgatatgcatcgacacacgctgtatgcccggatcggcgccaaaactcaacgcggccatcatcagtccaacacgcagattgtagtccgcgctcatgcgggcgcgttcggcgtccgtcatatccacccatgcgtggcgggacacgtcatatttggtggatggcatcatggaaacgccggcagaggtgaaaccgatggccatattgccgtctcggagactgcatcggaagtccacgtcgaagcggtatggcaggcgcatgctgcgcaatagtctcgacattgtctggcggtatacccattccgaaccgccttcggctccgaaggcggtaccatcctcgccgtccttcgtgttttcggcgatggaacgtctggtttccgcggcgatgtccaccaggcacatgacggcttggacgccgtcatcctgctgtgagtcgaggatcgcgccgaattcgtcgtccggtttcaatgcgatcagcgccggattttccagtagcgccatgtcgatttgcgcggcttccgcgcgggttacggtgtcttctgtgggcagcttgccgatacgggcgttgcgttccagccatgaactgactgcggcgaaacggttgaggttgccttcgatgttcagcgcgcgcagcgatgccgagaacggcagtgtggaatcccaagcgaagaaatagcagcccgagtagctggacgtgtataggtgcaatggttccgcgccgtgtactgcttcgagcccttggtctttgtcaagggcgcctgcctcgcgcatgaggtcggcgaaataatcctcaagtccggatgcgcgcatgccatgggagcgtgcgctcatcgtgtctctgatggatcggcggatcgcgcccatcggcgcctctcggttgagcctgcggaagatgttgcccgtgccgaatcccacgagtagcccgttcatttgtggcagcatgtaggctgcgaagaatgcgatggtgatggcatccctgtattccagatcgaatcgcatggtttccggcaggttggcacgcatctgttcgagcgtgtagcggttgccgactttcagccaggatgcgagccacatcatgcggccatcgggcatgcgtcccacgacaccgccttgcgacgcgcgcaccatcttcggcgcgccgtttgtcgcgtgtccgaatcgtggaccgtctggcagggtgagggtttcttctttgacgaatatgaatcgtggttccagatcctgcacgtccatttcgggattggtgcccgcgaagacgcgtgctttgctgtcggcgagcgcgatttgcgcgaagtggttgttgtcggtgaatagtccgatggagaaggctttgccttgggtttgtggcagttgcgcccagccgagttggagtgtgcttggtatgccttcgaagcctttgatgatgtgtcgtttgatgagtgggttgagtttgatggcgttgcgggtgagttcatcgacgatgtcgtctggcgtgtcgagggctttgccgaaggggttggcgtcggcggtgttgtgggggtgtttgttgtggttgatgagttgtcgtaccccttgcatggcgtggttgagcatggtccgtccttggtgtggatggtgtgctgatggcgatgctggtgtgaggtgtgacatgtgggccattctttcaattcaatgcgacatgcagcctttagaataaagttcgtgactttttcgaaacagcgttttcaggcgcgtcatcgtgtgtgcgcagctattgtagccgcttttgttgtggtggtgttggttgagtgcgtgttgtgtaatgtgccgtttttccgctcgttggcggcgtcgggtgattcggcggctgcgtataacacgttggggccggggcttgagcgtcgtgatgacgggttgttggaggttactgatccgacgcaggcgtatttgcaggtggctgcggatggttcgtctgagtatgtgcggatcgtgccggtgtccgatgaggttatgggtggtgtgcctgccggttcgcgcgtgttgcgtacggtgcgtgttcgtgcggatgcggatcgtgtggctggttcgttgtgttcggtgtcgttggattcgtctcgttcgttgtatgtgagggctgcggccggtcgtacggtgcgcgtgcaggtggtggagccgaaggggtcattgattccgtttgatgcggttcgcgcgaatgtgcgtgtgccgttttcggtgagtccgttgcgtgtggcgttgttggtgttggtgatggtgttggtggcgttgtggcgtccgggctcgcgcctgtggaaggtgccgttgaatacgtcgagtgtgcgtcagcgtgtgacgttgggcgtgttgttgacggttcctgggttggtgactgttgcggcggtggcgtggcagttggtgtctgcggtgccgttgagttttcatacggatggcatgtatacgtatgattacgatcagtatgatcatgtggctcgggcgttgcttaatggtcatgcgtggcttgatttggatgtgcccgacgcgttgcgcgatgcggataatccgtatgatgtgacgactcgtcagcaattgcttgccgatggtgtgagtccggtgtattgggattatgcgttttttgatggtcgttggtattcgtattttggcgtggtgccggcgttgctgttgtttgtgccgtatcgtgcgataacgtcgttgtgggttgatggtggtctgatgatgccgtctggcgctgcggtgccgctgctgatgtttgtttttttggtgttcgcgtgcctgttgacgattcgcgtgatcgagcgtgtgcgtccgcatgtttcgctggctgcggtcagtatgttgtgcgtgtttgtggttttggcgtcgaacgccccgtacttgtggtatcggacgaatttttattcggtgccgattgcggcgtccttgttgttgagcacgttgggcttatggctatggatgggtgcggcgcacccgaacgcggccgatgccggtggcgatggtggtgcgaatacggtcgaatcgttgtcgctgcctcgtttggctgccggttcggtgtgtattgccgcgaatgtgggttgccgtccgtcgtttgtggtggtggcgttcgccgcgtttccgttgttctggccgcagattcgtgcgattgccaaacagttgcgtgatggcgtgttcgcttctggcgcgcatgggcgcgtctgcgccatgttgcatgcgttgcgtgcgcctttggccgtgctggtgcccgcattggttgtggtggtgccgttgttcgcctataacatggtgcgtttctcctcgccattcgatttcggttcgtcatatcagataacggtcacggatatgacgagctaccatcagtcgtggtcgaatttcatttggacggtcgcatactatctgtttttgccgttgcgctggacgaatatgttcccgttccttgccgtcgaccccaccccattgaaagattgggggttcacggaggcgatgcctggaggcctgttcgtcatggcgcctctcgcattggcttcgctggcatgcccattcctacgccggcatatgcgcgctcgtggtcatgtcggtatgtggcgtacactgacgacgttcctgctgttaagtttgctgattgtggcgcttgacgcgcgcttgggtggtcttgggtggcgctacatcgccgatttcggttggctgttcgccttggcttcgttgcctctgctgctcattgcgttggattgcgaccgtccgcggctgtgctggctgttgcgcgtactggtgttggcgctgctgctgttcatgttggcggtgacggtgttgtcgttgttcctatatggtcgcgacgacgagctgatacgcaataattccggtttgttccatgacgtgcagtcgtggttcaccctgatatgaggcacggcgttttcagggttatttcagggttttattacggtttgtccaataaaatctccggtttgttccgagttttgcgaataatagtggtgtcgtaactgttcgatatgagatgaacccttgttggagacatcagttatgaaatcgcttccacttctgtctaaccatcctcgtgttaaacgctggaccgcggccgtggtagcatcggccatcgcattgggcgtctgtctcgccagctatgacaacgtcgatgcggccatcagacaaaacaggatcgaacggctgaacgcacgtatcgagaatgtgtacacagccgactatcagaatatggccgacgacaagctcgagcaggaaaaaagcaagtctgccgccacggaagatgacatgttcgtcaccgaggatccgtacggcaccaacaccacgtcgctgtatgtgtatttcaccaccgacgactcggtatccgtatcctataccgtgcatgcggacggctacgcggatttcacccgtgacgcctaccagcaatcgcaatacagcaaaacccatgaattccagatactcggccttattcccggggaaaagaacaccatcaccatcacgttgaccaacgccgatggcaaatcccgtacgcataccttcgaacacaggggtgcttccctgcttggcaatgaggaagtgcaactggagcagaccgtcgtagctgattccggagaagacttgggcgatggcctgtatgccatactcggcaacgattccgacgagcaggacttcatgttctattatgatacgaacggcgtgctgcgcggtgagattcccgtgctctactatcgttcgcatcgtctgctgttcgacgatgacgggctcatgtggttctccgcttccacacaccacatggcagcgatgaaccgtctcggcaagttggagaagatctatgatcttggatccgactatattctgcaccacgattacgcgatggacgccaatggagacatcgtgctgttggccaccgaaatgggccgcgacgacaatgccgtgcaagatcaggtcatcaagctcaacacttccaccggcagtgtgacccgcttggtggatttcggcgaactgttcgccgactataaggcctccaccacgcatgcaggaaccgacgagtcggattcgagcgcccagaatcgttgggattggctgcattgcaacaccatccaactgttggatgatggttccgcgttattctccgcacgcgaaacgtccaccatcatcaaagtggatgatctggaatcagatccgacggtcgactacatgatcggcgagccgtccgtgtgggcaggcaccgatgaggtcagcagtttcctagcgaaagacggagatttttccgataccggcggacagcattccatcacatacgtcgccgatgattcgttgcctgacggccagtattacctgtacatgttcgacaataatttcggcacttcgttgacgcgtcctgattttgactggtcggtgatcgacggaatctcgatcgaactgtcttccgacacggcaaattcgcggtatcgcaagtatctggtcaacgagaatgccggcacgtatacggaagtgtcatcgttcgacgtgccatattcgccgtatgtcagttccgcgcaggaattggataatggccagatcctcatcgactcgggcatgaagggtctgttcggccagtacaacaaggatggtgatctgctggcgcagttcaagatgacgttgaacagtgcgtacatctaccgcgtgtacaagtacgatttctcgggattctatttcgcctgacatcctgtccgcaggcttgacggggccgggaatctaaactccttgtgggagtttggatttccggccccgtttcgtatgcaatgggttcggcacgcccgtacaatggttgccatgggttttttcgattcgctgttttcatccaaacgtcccgaagcgacgcatgacgtcacgttcacgctagatcaggcaggccacacgtatgaggatggcaatgtcggtctggagccgacatcgttgacgatcactccggaaagcaaacgtgtggctgtgatcgggttgaatggttccggtaagaccacgttgctgcagctgttggatggcgcattgtctgcgacgtccggttcggtgcgtatcgacgcgaatggtgctgcgtatgatccgtcggtgaaacgtgatctgaaacgtatcgaatcgatgatcggccgcgttcgtcgcgaggaaattccgaacagttattacaaagcggattccattcgcgaggcgattgatgaaccgttgaagaagcataaggtgccggaaagcgaacgccaggcgatcatcggcaatctgttcgcgcatttcgatctggcggcggtcgcacgtgagcccgcctccgcattggatagcgagaaacgtcatctgctggcgatcgcttccgcattgagcttctcccccgcggtgatcgttgccgacgagccgaccaagggtttggacgaggtggcgtccgcgcatgtggcgaaagctctgttcagttacgacaaacaggtagtgttcgccacgcatgacacggagctgatcacacgcgcggaatatgcgatcgaccgcacgctggtggtcgacgatcatcaggtggtgttcgacggtggcccgcatgaggccgtggccttttacacggacctcatccgcgctaaatatgaggcttccaaagcctgaccatacccacggattattcccgttccccacatgttgcggctccttcatcggtgtcgacgatggaaccacaacatgtttcagccgatcattgtgttgacggtgtcaagcaccgtctgaacgttatgcctgaattcgtcgggttccggcaataacgagatcgcgagatagccgttcgacgtcatatcgaagaaatagccgggctgtcctgaaattccgtgcttttcgatcatggacaacaccagttcgttctcgtcaagcacgctgggcacgcgcaaaagcacattccatccgccttcggcacgcaacacgctgaccatgccctgctcgtcatcatccagcatggtatgcaaggctgcgaggttggtttgcacgcgctctcgcacgcgcgcggtctgcgcggctgcggcgcccagcatggcggggatctgtttggcgatgatctcactcattggcagatagtcgtcggcgaccacgtcgagtctgcgcttggcctcatccatttcagccgccgggccggacacttggatccaacccactttggcatgtggcgcggccaacgtcttcgagaacccatccaatgcgaatgtgagcgtgccggtctcccccgcgagacgcgcgttgccatcgaatggttcaagatcatagtcgtagaatacctcatcggcgatgatggccacctcatggtcatgacaaagccgcacaatggcctcacgttccgacgctttgacgtacgatccggtcggattgttgggattgatgagcaccagcgcgcggatgcggccgccatcttcaccttcaagcgcttcgcgtagttcggccacgtcgatgtaccaggatccgtcgaaacgttgctggtactcgatcatgtcgacgcattcgagtcgtgcgatcgattcgatgagcggatatcccggcttcggtgcgagcacagcgtcacctgcattgcagagcagtttgatcagccatgagtacgcttcggacgtcgagctcaatatgtataggtcgtcggcggtagcggtattgccttgttcatgcaggaatgcggccagcgcttcgcgtgcgtatcgttgcccgcgtggctccgctccgtagatgtccggcaatagttccgacgcgagcgcatgtttggttggattggagtcgttgagtttgccgagtgtgatgccgtttgctttggcttccgcttcggctttggcgatgggattgggctcgctgatatcgactctggaggaaaaacgcatggtctccaccatactctctgggttgcgcaagtgttgcatcgagcaagaaggatgcattcgccatgcgatcatcagaggaataacaagagccgtccgacggatgaatcggacggctctcgcttatatgaaggttaggaacctttatggttcacgacatcacttctgcttgatgcttgcgtagtacgcagcgccgatgatgccagcctcattgtgcagcttggctgcgacgatcggggtcttgatgtcgatgtacggcaggaacttctcggacacgcgggacacgccaccgccgacgacgaacagctgcggatccaagtagaactccatcagggaataatacttggtcagacgcttggcccacttcttgtagcccatatcgagcttttcacgaatggaggatgccgcgtacttctcggcgtcacccttgcccttgagcagttccaaatggccgagctcagtgttcggaatgagctcgccgttgaagatcagcgcggtgccgatgccggtgcccagcgtggtggcgacgaccaagccgtcctggcccttggctgcgccgaactgctgttcggcaagaccggccgcatcagcgtcgttcaccacggtgaccggacggccgcaagcttcggagaacacttcggtgacgtccacgccaacccaagactggtccagattggccatatagccgagcttctcgccaacatgaatcggagcggggaatgcgatgccgaccggagcggactcaggaacctcaaaatgctcgagctgctggcgaacgatttcgccaacggccttcggagtggaaacctccggggtgaggatcttcagacgcggttcagcaaattcgcccttctcgaggttaaccggggctgccttaatgccggagccgccaatgtcaacgccaaatgcctgtgcagtttcaatcatcttcgacctctcctatcaaggtacatagtgggtatatcgaaccggtaaacgccatagtaactcgccccatgccccaaaacgcgccgacaatacacaattggtgaatacgattgcataatctgtcgcaatgaaacgcaaatatttgcgattgttttctgcaaacgattcgccccatgccaacgcaacgcatcggcatggggcgaatcataagaaaataaccgtctgaagacggtgtagccacattacttgagcggcggcatcggcttccaatccggatcatgcagcagcttgcgtgaatcccaccaacccttggcaatctgcaccaagccggtcttggcatgctcacggtccaccatcaccaagcgaatgacctccttggcggcggtcagcaacgtgccaaagccgaacatcagcggacggtaatcgccgaacgacatgaaatagcgtgccatgtagccacggttgcgcatgatgtggtagcggttcatgtcggaagtggagttgagctgacgcacgccggcgatatcccaattgccgatctcgcgcgtacgtcgcaggatcacgtcgggcaccacgatcggattggtgaccttgctggcgcgatagccgtacatcgtatcgtcccagtagatgaagaagcggggatccggcaaaccgatctgttccacgatattgcggcggaacaggccgccttcaaagcataaggtgtccatcacacgatagccgggacgcccgaacgcggccggagcgatcggattgggaatgccaagaggcacgatgaaatcgtactgccagtagaacgggcctccgtcgtagtcgtatcggcttccctggatcacatcatggctgccggtccacttggcgagcctttcaatggcctcgggcatcacggccacgtcgtcgtccatcacccagaaccactccgcacccagctcgtatgccttcttcacacctgcggagaagccgcctgcgccgccgaggttgtcggattgcggcgcgtacaccacacggctttcgttgcccgactggtcggcgatggtattgccccactgcgcggtgaccgcttcacggaaatcgtcgaccatgccttgggtcgcctcgctgtgctcgttgtccacgacgatgatacgccatggcgccacagtgagtttttcgatggattcgaacagggtggcgagcagctgctgacgcctgtacgtcaccacgacgatagccagcttttcgatggtgttcttcgcaacttgcttttcagtcatacgttccattcttgcactcgccctcaaccgaacatcgcctgtgttcgcatcatgcggcacgattccattcgacggacgggctcttgcacatttcgtgcggctttgccataatgtacggcgtaatgcaggggaacccgtgttcgtcgggttgagatgggccaagtgaggcctgaaccctttgaacctgatggttaacaccagcgtagggaggcatgtctagtgactgctgtgacatcaacaaccgatttcgattatgagttcgacgccgccaaaggcatccaacgcgacaatcttccgccgttcgcgcagcgcatgcgcaaggccgccgacctggtttgggaggaaggctaccagcagccgttcatccgcgagcttggcgaaggtacactgcaacgcgagcgtttcgccttctatctgctgcaggattttcgttatgtgaacgattacgccagagtgcacgctttgggattagccaaggccaccgaccctgaaatcatggcgttcatgctcaaggtgcagaacggcgccctgcaggtcgagaccgaagtacaccgctcctacttggccagctatggcatcaccgaagagcagatgaacaatgtgcgccagtcggccttcgcgcgtgcctacacgtcgaatatcctttccatcgcctatggcaaggatattctcgacattctcgtggccgtgctgccgtgcgcctgggtgtatgcggattatggctaccgtcttgccgccgagttcgcggacacgctcgacgacaatccgtacaagagctgggtcgacatgtataagaccgacgagttctggcaggattccgtgtggctgctcgatcatatcgagaaactggtggccgacgcgagcgaggagcgcaagcgcgagctgatcgacattttcgtgaccggcgtggagaacgaatacatgttctgggccagcgcgtacgacatgcagtacacatggaagcccgaatggaatcaggcgcgctgatagcactccttcatggggtttcctgacttccgattgtttattttcattgcagcaaggcgggtgtcttctgattggttttcagaaagcacccgccctgttatgtttggtcgcgtcagtttcccgctttattcgcgtacgaggcggatatgttccacgtcgtcgcgatgggagcggcggtagagcacgaaacggttgccgatgacctgcacgagttccgcgttcagttcttcagccaatccctcgcctgcttccttggcggtcagaccggatccgtcgagcacggagcacttgatgagctcacgcttttcgatggtttcgtccgcctgcttgatggcgttttcgctcagatcgttcttgccgacctggatgagcggattgagcttggtggccaggcctcgcagctgcttgacctgcttcttggttaatgccataacttgttccattcctatctatgatgcttgctcaagagtagcgtgaggacggtaaaatccgccgactgccttcagtttagtccagcgatcagaaccaacgcagccacatatgccacaaccacaccgcccgcggcaatgtctcgtttggcgatgctcatcacgcgccaatgtgtgcgtgcgataccctcttcatagcatcgcgcgtcgagtgcgagactgagattgtcggcatggcgtatcgcccctgcgaacaccggaatgatgatggaaaccatcgccttgatacgctgcacgaacgttcccgtttcgatgctgccacctcgagccgcctgtgcgtccgcaatggctttcgcctcgcttcccagagtgggcaggaaccgcagtgcgaggctcatcaccagtgcgatctcctgcgcgtgcacgcctatttttgcgaagggtttgagcaaggcttcgaacgcgtcggtgatggccgtaggcgtggtggtggcgaggaacaccactccgacgataatgaccgcaacgaatctgcaggcgtacagtatagcgatacgcacaccgtcgtcggtgattggaatcggtccgatgttcgtaagaacattgccggattgtacgaagaacacattgagcagtccgcagaacacgaacaatgcaaggaacatgtgaatcgatttgaacagttgtttcacgccgatgcctgatgtcgcaacgatcatgccggtcaacagtgcggccacgagcagctgccagaaagagcggatggcgaatgcggagaacatgaccgccaacgcgcccaccatcttcacgcgcgggtcaagccgttccataaaactgcggttttcacggacgtctccctttgcatgtccggagccaagcgtgtgcagattcttcgaacctgccgattcgacagcagaaccaggctcggcatcacgaacttttccgccaacgttccggtcagcgtcaagcgcgatcgtccggtcggcaagtacgtcgatttccgcttgcgaatgggaaatgatgagtatggtgatgccttgtgcgtggagggtttggatgagattgtgcacgcgggttgtggccgcttcatcaagtcccgcggtcggctcgtccataatgagaatccgcggttggcatgcgatgacgcccgctatggcaacgagtcgttgctgcccgccggaaaggtcgaatggcgaacggtcggcaagatgttcaatatgcagcaatgccatggcttggctgacatgttcatccacttgcgcttcatcaagccgttggttgcgcggaccgtaggcgacgtcctcggctacggtttcggcgaaaagctgacgttcgggatgttgcatgacgtagccgatggtggcgcgcagtttctcgcggtccgcacgcttgagcgactgcatattgccgttggcgcgttggcgtgcgacgggaatggtgttgacggtaatgctgccagattgcggctgttccagcgcgcagagaagacgcgcgagggtggttttgcctgcaccgttatgccctgtgatggccacggtttcaccctcattgatggttatggaaagcttatcgagcacaggcttgctactgtttggatattgatatatcagattatggatttcaatgattggtacagctgatgttggcttcgatgcgccatttgcaatattggatttggcaattgggttgtcttcttgcgctgtgcctgattcgtccatttccggaatacttgcagtattaccgcgagcgctttgcacgatacgcccgttatccaggcgaatgatgcggtcggcattgacgaattcgtcacgatggtgggtgacgagaatgatggttgtgccgtgctgctgcaattcgtcaagaatatgcatgatgtcggcgcggccttgcggatcgagcatggcggtaggctcgtcgagcacgaggatttcgggattcatggcaagcatgccggcgatggcgacgcgctgctgttggcctccgctcattcgcgtgggatcggcttctcgttgtccgctcatgtcgactgcgtcaagtgacatggcgatgcgcatatcgatatcatcatgcgcaatggcgaggttttccggaccgaaggcaacatcatcctcggtaatggtggtgacgatctgatcttccggatgttggaaaaccgccccgataccatgccgggcgctgcggtaagcgtcagcgtgcgcgccggagtcatcgaatacgttgtttcccaacaacgtgacatgtccggcatcgggtgcggcaagtcctgcgatgatgcgtgaaagtgtggatttgcccgatccgtttggtcctgctaagcatacacgttcgccttggcgaacggtcaggttcacgccgtcgagcgcccaggtcgcgccggagtcgtaggtgaaacgaatatcgtgcagttcgaccgcgatggtgttcgtggcgctgtcaggattcatggaaaaagtctttcataaacgaaaggaaccttccatacgtcgaaaggttccttcctattcatcaatatgcggaatcgatatggtgaacgaggctcagcggttcaacaggttggagatcggcttgtagatcaggaaggtgaccacgccatggatggtgaatttcaacgcgttgaacggcagaagcgccggcacgatcaatgccacgacctgtgcggtggtcatatgcgcgtagaacggtgtgacgattatattgcccacaatcgccatcgccaaggctgcgatcgcaccgacgatgatgccgatgaccgcgcctttgcgggtcttgttcctgcggtagatcagtgctgccggcacggataatgccaaagccacgagcacggccataagcgtgccccatgggttggtaaacaggtgcggcaggaaaccaagcacgctgacgattaccgccgccgctggcccgtaggcgaaacctgccaccaggctgacaatgccggatggatcatatttcagccattcaacgcctggcacaatgggaaattccacaaagctgacggccatcgacagcgccacgaacagcgcatacatggcgatgcgtttggtggaccagcgtccagagtcggccacgcctgtggaatgcgcgttgtcggggcgcgtcatgctttcgctggcgatttcggcgtcgttgttttgggtattgtttggtgaggatacactcatgttgagccccgtttcttccatccggactttgaccgttggctccggattctcaccggatcagccgctttcgcgggtcgcgggcttcggcatgggaccgttatgaacgtcagtcgtaccgttaccgccagtaaggattttcaccttccctgaaacttgcacgattatatatacgcctatcgtcggaaatatgcaaaccgcgtctcactggcgtctattatcagcaggcatcaatctttaatccggaaaccatgatcttagcctcatatgccttttgcctatggcatgaacgtcgcctcatggtgtgttgccgcagtgtgcgctttacctgttgctttcgtatcgtgtgcgttcaagcaagcggcaggtacgttgattgttatgccagcaggtcgagcaagtcgtctttgctgagtgtgccgacgcctccagatgcggtgccgtcggtgaactgttgggcaagctcacttttcttctcctgcagtttgaggatgcgttcctcaatggtgtctttggctacgatctggtacacgttcacatcctgcgtctgtccgatgcggtgcgcacgatcggtggcctggttctgcgcggccgcgttccaccacgggtcggcgtgcaccactacggacgcacccacaaggttcagccccgtattgcccgctttgagcgagatgaggaacacgggaacatcgttgccattgaattcgtccaccagttccacacggcgtttcttcggtgtctcgccggtgatggtgtagaagtccacgccctgttcagccaaacgtgtaccaatcaggtcaaggaatgaagtgaactgcgagaatacaagcactttcttgctttcgtccatgcacgtggatacgagttcgcagatggcgtcaagtttggcggaagcgtttttcgcatccgcatagacgagtctcggatcgcaacagatttcgcgcaacagtgtgaattccgcaaggattcgaatcttcttcgtattgaagtcggcgtccttggttttggtaagggtggcgcgcaaccgttgctcgtgcgccgcatagagtttgcgctgttcgccttccagtttgacggtgagcacgttttcgaacttgtcaggcagatcggtcagcacgtcttttttcagacgtcgcttaatgaacagtccgaccaaagcctgcagtttgtcagccatgacggaatgttcagaaccgggtgccatgatcggctgttcgtatttttctcggaacttcgtgtaggttcccagcaatccgggcatgaggaagtcgaagatgctccacagttcgctcaaccggttttcgatgggggttcccgtcaatgcgaaccggtgttcggcggtgatctgtttgacggctttcgccaacttcgtggcatggtttttgatgtattgcgcctcatcgagcgccatcaatgcgaaccggcaggcggcgtaatcatccacgtcgcggcgcaataaatcgtatgaggtgatcaccacatcggtacgctgcatatcgttggattccgaggggttcttccattgctgtgccacggctgcgatgagcttgcgccgttgcgctttcgtgccggccacaacttcgatggtgagatcctgcgtgaatttctcgcattcggcggcccagttgtataccaaggacgccgggcagacaatcaacgcgggaccactgcccttgcgagcttccaccagtgacagcaattgcacggattttcccaaacccatttcgtcggcgagaatgccaccgaagcctttgtcccacaaggtggaaagccattggaagccttccatctggtacgggcgcagtacgtttttgaggttgccgggcacttcgtatcgtttcgggtcgatgattttcacatcgttgacatagtcgacgaacgattcgcttttgccgtcatcatcaacttgggcgtccaagaggaacgcccgatatccgggaatggtgattcttccggaatcaagctgtttctcatcaaggtcaagatctgtgacaatctgatcaagttcatgcagatcggcattcttcagatcaacgaacgtaccgtccttgaatcgatggtagcggcggttcctgcggtaggaattcagcaacgcgccgacctcgttcatcggcacttcgtcggctatcggcgaaatctcaaccagattcgagtcgatggacagtccgaccttcaccgtagggctgcctggcatcatcatgccgtcgaacgcggccgtggagaacacctgcccgaccgagcgcaagatatccacgccttcggtgagcaagagcagaatagtctgttcgtcttcctcacgaatccgcgccacgtcaatagaactccatgtcgggaaaagctggcgaaccacctgcaccgcgaatgattcgcgggccgtatctcgtttgatgagcgccgctttcgaccgcgagtccggattaatcacgcctcgtagcgctttggcggtcggcaccaactggaacacgaaatcgccgtatcgtgccacagcctcacaggtgatgccctgcagatcacggtccaagtagaattcgatctggcagtcgactcccatccgttcggcgacttcctgcggaatatcgaaaccaatgcccgcttcggtaagttttggcagtattgttcgtgcgaacatgggccagtcgttttccgcaatgaacacaccatcgctaacgttcgacgcgcacaatgtcatcaacgcgtccactgcgggaaggatgctgtcggtacaacggaagagtccgctcactggcctcatatgggaatccgtcggagtgccgttatgttcggcactcatgaggtacacgccccgctgcccaacaatccgatccgtgatggtacggttcgacgtgatacgcacgcccgacgaagcgccttccttcacatattcggcgatgaaccgaaattgcggattgccatcgaatatggcgatagtatgcgatctggactcccctggcgtggccacttcgacatagcccggagcggcgtcatccgtatgggcgaaatcatccgaagtgagctgccgcgccctctcacgcccctcatgcttgggagcttccagcggcccacgtgctatcagcacgtcttcgatgtagtcctgttgcggttccgcttcgaacaggttcagtagatcgcacaattccccatcggtaagcatgatttcacgttcgatacgcacgtctggcgcgtaatagtagttgttctgcagttgcgctgcggcacgtgatccaacaacaccttgcaggaatcggaacagctgcagcgagaacggttcgagcatgtccggagtgtgggtgaacgagagtttctgtccgtatgacacgtatgccccgttgtgcatgtcggctacgaatttggaaatgcttttgatgatataacttgcgtcgccgcagccgattttcaacgtcaggctccacagctcacggttcatgatcagcgtgggctccagacgcacgcttcccggtttcactatgatggaaccgctcttgcgttttgttttcgtggccccttgcgtaatgacgcctcgttgctcgtcggcgagacggcttttcgcgtcgacgatgcgcttgagcacgtcaagctgcgcgctttgaccggtattgtcattcttcgcatccagcgcacgcatgtagtcggataggatatgcgaggtcacgccacttcgcttgaatccgcggaaccgttcgggctggtcaagaaacagcagcagcattgcggcgacatgcttgcacatgcccgtatagcggcgccccccagccggatccgaatcgaactcgtcatcgtcctgcacatgaccgaacgtcgatcctgaaccgaaatcatcataatcatcgacataatcgtattcatcgtcatcatcatcgaaactgcgatattttggattgttgcggtagctgggcgaatatgccgacgaatacgtgccataaccgtgctgcgaaccgttgaacgcggggcaggagcagtagcgcgctaagaacagttcgtcggagagatcgagcgtggcctgcacttcgtatcggctggacggtgaggtggtgccccgcatattggcatgcagggtgatgcggtcggaatcggagtcgttcaggcaatgcagatccgacattttcgcacgccactggttggcgattccacgggcacgctgcaatacaggctgactgcattcgctgcgtagttcgtcggaaagccatgacaaagtatccgccaactgaaccccaatcgttcgcacatttgttcttatgaaagagtatcagcacagcggaacaggaaagccgtggctgcaatcccagccacggcttcgctccataccggttatatcagcggcaacgcttggtgagcggctgccatggatcgagttccaccggttcggattccagcagcggcccgatctacgctggttggtaatggagccctgcttcagtcctatggagaagtcgcgcggcagcgagcgctgacccttgtaatcggtggcggcttcgagcacgcccacagataccgtcgcgttgaccgtggaaccgaccgataataccggtgcagtcacgagaaccgctatagcctgcgcagctgcgcgatatcatcgcgcagctggttgacggtgtccgtcagttcccgcacattgtggcgcaactgttccgtttccgattccgcctcatccgcacgcttgtcggtctcgtcacgaacacggtcgacaatccatgaagccagcgtcgcggtgacgatgccgatcagggcaacgccggttatcatcagtccgatggcgatgcatcttccctgccatgtcaccggggacaaatcgccatagccgactgtggtgacggtcacgaacgaccaccatatcgcttcaccgaaatcggtgatggaagcgcccggaaccccacgttccacatccaattcggcaagggcgccgatatacatcagtagtgtcacgctgcagcatgtgtacagtgtgatgcgcccacgcaccgccatgccaccggtacgattgagcacgttgagcactgccaccagacgcagcagtctcaacggcctgaagacgggcaatgcgatggacaccagcatcagcagattgtctttgaaccaagttttcttatcttctgccagcaggatcgaaacgacgcagtcggcgatgaacaccatccagatgatgttgatcaccatttcacacaacaggatatgcgtcctcgccagaacttcccacgaatacgcgaacaggaacaccaacgccaatgccgtcatgaaccattccgtcgcacgacgccatttgttcaatgtcataccctttcctttcttcccgactgccatcatacgggtctccccgcacgcgcgaccgtcagcttttgatgggcatgcgattgtcgagcgactgaccgttggcgtagcagcggacgttgcctaatgcaatggagatgatactgcgttcggtgatctcaagatggttgcctcccgccacatgtggggtgatgaggcatttcggctcgcaccacagcggcgagttggccggcagcggttccggttcggtcacatcgagcgcggcaccacggattcgtccttccgcgagcgcgtcggcaagcgcctgactttcaatggcgttgccgcggcccgcgttgatgatgatggcgtcaggtttgagagatgcgatgcgttccgcattgagcaggtggtacgttgtcgaagtggatggtacgcacatggcgatcacatcggcgtattgcagcacgtcgtcgagggactcgaatcctacgatatggtcgacgcccggcgcttcgacggcgggattacggcgaatgccaatggttgtcattccgacgtttttgcagagtcgtgcgaagtgtgatccgatgtcgccggttccgatgacgagcgccgtttttccgttggggctgacggcgcggcccgcgtcttgccacatggcattcgggttgcttgccgcatagatgtgcaggttcttcatgatggcccacatcatggcgaacatgtgttcggagacgctttgtccgtaggctccggtggcattggtgagcatggatccgggctgcaggatgccgggtcgctggtatttgtcgacgccggcgctccaagtttgaagccattcgagtttggggcactgcgcgcattcctcgggcgcgatgttgccgatgaccgcggtggctttggctttgagctcctccggtactgcggcggtccagctcatgcttccccgttgggtcgaatcgccgacgaattcctgtggtatgtctttcgcagcacgtatgaattgcgcacgttcggattcggtcaacggcaggcagttgacgatcaatttgcggtcgttccatattcccatgcgttttaccctatgacaatcgtcggatatagggtttcacgttgggttctgggtcagacgccgagttcgtcggtatcaaagatgatggtggccggaccgtcgttggcgagccgcacgcgcatgtgggagccgaatcgtccttcttttacttcgagtccttgcacgcgcagggcgtcgttgaatccgtgccatgtctgttcggcgtgcgcgggcgctccggctttcacgaagcttgggcggttgcctttgcgcacgttcgcgtatagcgtgaattgggagatggacagcacactgccgttcacgtcgtggatggaacggttcattttgccgttctcgtcttcgaagacgcgcaggttggcgattttgcgggcaagccagtcgatttgtttcgctccgtccgtgtcttccactccggcaagcagcacatagccgatgcctatatgctgtggttcgaatgtggtgtcgacttctccgcttgtctcgtcgaccacgtcgacggatccttcgccgaccttctgcaatacgatgcgcatagtccgtcccggtcttttcagccggcgtagtcgacgatggcctgcgtgacctgtttcaggtagtcgagcgacgtctgccaatcgtccggcacttcgatggaatggttggcaccagcgtacgtgcgcacatggtcggtgagcagatgcgctttggcgtcatcgtagtatgggtcggcgtcacctgcgcagattagcggcatcgggctgccggcagttcccggtagcggcgcgggaatgaccgacttgtgcttgtcgaatggcggcgggttgagcaccggggtgagcagcaccacacgtaatcctagttttgcggaatgcggatatgagagtgtggagagcgatttggtgacgaccagcaaatgcggctcctcacccgattcggcagcatgttcgagcgccgccttgcgccattcgtcgaccacgcgttccatgcaggcgatcatttccggaaactcgacgctttccgtcagtttcaggtcgagccggtccacgaaccatccgttggccgcaagcgcctgcgctgcccagtacagcagcggtcggtctacggtgtatccaatgcccggcatgatgagcacgtgattgccggtttcggtgttcttcacacggttcttaccccatggggtgaccgccggtgtgacgtttttcgttgttggttgcgtgccgttcttgcccatgctgtgtttgattcgccttttcgtgtgttccgtccgtcttggccggtcgttgcggccggcgtcgtttcccatattgcatgctaggcggcgccggctacaatcgtttccgtcagttcaccacgcattggttgccgaactacggaccgacctattacgccgctttcgtgcacgatccggaaggcaacaacatcgaggccatgctcgtctgagtgtccgacagctcaacagcgacaagaccagatcccgccatacgttaatgttctcatggcgggacctgtcatattcccagagaatcaaacatctcagcagccgtatggaaacacgggccgttctccgctgaatattcatggacttcccgcaaggcagaaaacgtatcagtaggaacggcgctctgttgaggaaggtctaataaaagtcggaactcgtacgtgcctggattggaacacatatgattttcccctttagccctggttacttgaacaggtcgaacagactgaacgtggtcttcttgtagacggtgttgtacagtttgcgcttggggtacagccagcccatgcccttcttaccatagccggggatcagcgcacgcttgaccgcacgagtggcgcggcccttcgtacgcgcggacaggctcttcttccaactgggtttcctcattccatacttcatgacagcctcttttcggacggttatgtatcgctcaacattgcatacgcatcggctggataaactcaaagatgaacatagatgaacatcaagtacagtcaagcaattacttactggcagcttctttgagagcggcctgcagttcaggatcaacggcgaataaatacaatccatgcacaccgcgtttgagcagaacattcagctcattacgcagattggattgcgcgtaactgattgagccgttcctcttactcactgcacgtttattacaacttgccttttcgttaaaaacgattttcccttcgcgataggtaaccgacggtccaatgatgacacctacataattaagatcaaacccctgaatagagaacgttgatcccacttcattaagcgtatgcggactttccacccagacagcatctagggaaagacccttatcccctaccttgatttcgtaattccatggatgacagaaataatcagctcttccatcaggattaaacgcatcgtatcctctcggcattccctgagccgctcccatgcgccatactccctgtgcatcgcgatgcaactcaacattccagagaccatcgggacttgaatcgttaattttgccgcccttatactcccaatcatacgtagcaaccacacgagaaagcccgcatccgtcaacgcctgaagcctttagatatgccttctcctttatggctttaaacagttcaaccggcgaatcgaatactctgatttcaaatggctcgcggacatattcgcctgtttctctattcttctccccaatgtcttgaggaatacgacctattctcttaccatcagcgaaatcatcaatccatcgaatcgtcgcatcatccgcagcaatgcgaaattgcctatgcaagcatatgcgacttagcaaatagtgatcaccccacatattcaatggcacaaatcgctccaactgcccgctatagccagcagcagtttttgcacgtcgctttctgcttgctgcggaaagagcatgtcctgatcctcttcgctccaacgctgcgaagtttgcaaaatctgattcgggtcgaataccgcaataaccactttcgcacgacgcaataaatcgtgcagcatgttcttgcctgagtatccttggtcaccctgcgtcaacagcagatgagcttcatcaacaagcactacatcggctttgcctcggggcttgtccgcaatagctcgattacttgctgttttctcactaaatcgattgatgaatcgacttggtttaagagccacctcgccaaaatgtttctgcaaacctaatttgcttgcaatttggttatagacgtgcatttgctggttatggttgacaagaatatatgcttttctgcgatcttccttactgatttttggcgatgaatcggttcccagaatatcttcatcatcttcgtcattgatgcgcccattgatgtccatttctgttgctatgcgataaaacaggtgacttagcaaaaccgtctttccagtacccgcaacgccttgcacgaaaatcagtctcgataaaccggaatcggctgaattaccagagccggcaagagcttcagaaagcgcgtccataatcgattcctccgcagctatctgatcatcactcaattggtgaaaaggcgatgctttaaaaagtgcagaatcgcgaataatctcctcagccggaaatagttccggatcctgtcggttcagttccagccagatgtccgagaaaatctggctgaattcatcctgcgtatagtagtcgccttgcgcgttggcgcgacgattgttcaaattcttgactgcatcagagccaagaagataatgcatcagccggttctccacgtccaaagtcagagatttgttgaaatgcggattgccaatgacatactgtcacacagaacgagcgtcgctctgcaaattttcttgaaattccttccaatcaactctcgttttgggatcttccctcagatgatgcattgttcgactacgaatattattcgtctctcccacatacaccgtatattcgggacgtaaagtatgctgattcctcttctttgaatgaaccacatacaccgttggataatcgaaaatatagtgcaaagtctcacgctcaacagcagataatgtctcgtatcctaattgctcgacaaaggctttctctatttctgctttgtcatcaatgctctgatacggcaaatctataatgattgactttggaagcgcgctcttcgtcatatgctcattatgcacccgagagaggccttcagaaaagattcgacatacacttacgtattatgatttccgattcaagcatcaacgcgatccgtaaattcgtagcagagcgggactggtctcaattccacactcccggcaatcttgccaaatctatcagcattgaggccgcagaacttctggaatgttttcaatggaacgacgagccacaagacagcaatatcgaacatattcatgaggaaatagcagatgtactcatatattgcatcatgctatctgacaaattgggatttgaccttgacgagataatcctcgataagcttgcgaagaatgctcagagatatccggctgaatttgcctacggcaatagtaataaagccaattgacgctgtatatacgttcgtaggtaacacctgaatagttgcacgctgcccaatctgcattcactatgagccacgttttcttcgcgagcgcgacgggggttccaacagatagaacctgcatccaggttagtaatccgtcagaatgcgttcgcgcattctcgcgtactttcacgcattctcgcgtaccaacatcttgattacatattctgttcatgtacggcatgctcacttacccaagtgatatacaatgccggattcgccaccctgcgaagattacgtgagcagctgcagcaacccggcaaccatcttcgcctgaaaatcagtagtgcattgagacgtctcgcgaggcgcttggcgcgttcttcgctgtcgaagaacttcggcacacgcttcgccacttccaaccgctcgttccgggggcgacagaggtttccggcagcgtttccttaagagccacggcatacgcagtagtcacccattccctctttcagagctcatcgaaaatcagttcctaaaaactttcagatgttgggtgttcctctgcaatagcgtcatcaaaattcgaatcgcctcatgatcgcgtcaccaagacccgaatcgcgtcataatcccgtcacaatcccgtcgtcgaaaactgtctctgagccattacgatagatattgatgcacagatccgtatcgcagccaaggaattttgattccggcaatccggcatcacataccttctgcatcacacgcaggatactgcccccatgctcgatatacccatgtactcaaaagcagaggccaaggcatcgttacgtatatttcaaatagccccgcttcatgcgttcaatggtctacccatcggcaagcgctctgacaaggtgatttcaagccgattgtcataaatctcaatctgaatgctcgaatagttgtagctgcaatgcacttgcgttgacaatcagctcgcaaatggcatccgacggaatctcatatatgtcctgccagtgcacacccttgagccagacacccatatgaatgtcgcacagcacatactggtaggactcttcgataagctcctgcctaggcgggtaatcacaaatgtaatagggactccataatctcgtgcaaataagcgaaatcatcatcaatgtcacggtgctcatcggcagcttcaacgcctgcgatgaaatcagtcacgctatcccccattcgtgctcacaaggatgattcacgcataggaaaaacccgaacgaatccggtctcttcataagaatatccgccaaagaaggactaggcaggaaggagaccaccgtgtcggaatttttatcgaacaggtgggcttcaaccatggccttgaacagattggatcggagtttccttgccgttccctcgcttatggtttccagctcgggatgccatgtagccttgttcgcaatgaaccgatcataatcctcaaagtccagatgcgtattgccggtaagataatgctttttaagtacttcattgcgtaatatcggcacatcgcgatccacataagtgcctcgcggtcggatgtggaggaatccgggcctgccaaatatgcaagctctccaaccgtgagcgcactgagccgcctagtagtttccgccacaacgcgcctgttcgcggaatccgtgcgaatcgcaagaacgttttcctcgatggcctgttggcgaatcgtggcaatggattcgccgacttcttcgtcagcactcttgtcgctcttttcgttgaccttttcagagatcttttcagagaccttggtttgggaagaacgctcagtgctgccaccgcccatacgattcaggtacatttcggcaagcgcacggccctgcggggagagaagtccaccaacggtgaaggaaagcctgtatctctccccctgcgtcgtctccgcgccgtatgagccagccatgcgattctccttctgctaagacatcagtgttaagccacaagaacatttcagaatatttcatggtgtggataccagtagtatcagcccctaatggtggaatcattccgtatatcttgatctagaagtctctttcgatatgcagctatccaccgctcgagcaataggtaatataatgatgcgcaagcttaacaattagaatagcctaaagccaaaggagacggattatgttcggcaaagttcgtaagacaagaagcgactgcactgtcggcacgtatgaaaagaagcacgatcttccaaccggcaccattcggaataaggacggacgaaaggcacgcaaggacaagacgcttgcagcgcttcgcaaagaaaatgggaaagattatcgctgataaatcggtcgccggttaacaacgctcctccttgaaggcacaggtacagcaaaaacgcacaacgatgtttcggtcatacttgttccttccaatcagggaggcacaagaaaagtcagcaactcgtactatggacgccagcttgcagaaacacacaccacgaccaagcaactgaggcgcgacctcaacaactacgtatggtggttcaataatcagcgactccactccacccttggatactggagtccaaaagaattcaccgaacgaggactcgtcattctagagaaccatccaacacaccgttaccaatccatataaacaagcggatagttaattagacagtctgggggatatgcgatgtatataaaggaaatgcgcgtatttggattcaagagattttccaagctgcaagttgaactctcacctggaattaatattgtcgtcggtgataacgatgcgggaaagtcaacacttctcgaagtcatcaccgcagtattagatggacaatatagaggaacctctttagcaaggaatctgtcggaggatttatttaatgctgaaaatgtagccacatacataaaaaatattcgttcaggaactcaatgcgaaccgccagagattcttatcgaagctgtatttggcggtaatgaccaagaagaattattagctctctatgaaggggacgccaattccaaaggggcgaaggaatctggtatatcccttcgcatcaccttggatacagactcattcgccaatgaatatcaagaattcgttgattccagagaatgctttggaattccgatagagtactactcttgttcttggactacatttgcccgtaaatcaatccgccctgtcgggattaaattcaatgcttcactaattggcggagggcacgcatttgcttgggcaaatgctaaagcggttgtttcaagaattgctcggaatgtgctggaaccgagtgatcagattgttatctctcaggcgcatagacaaatgagaagcaacttttccgcaaatgaaaaagtccaacaaatcaatgacaagatatccgagaaggtagaaagcctaactagaaaaacggttaccctaggcttcgaggcagataccgttagttcttgggagaacggcattgtaacaaaattggagaatatccctttctcaaatgtgggagatggaaccaaaagcattatcactgcagaattggcattatcgaaaagtaaagatggtcaaaaagatgtgattcttcttgaagagccagaaaaccacttatctcatacacggctgagcatgttcctcgacgatgttaaaaaccgttgtaaagacatacaattgatagtaacgactcatagcagtttcgtggcaaacaaacttgacctcaaaaatctcatactattaaacggagacgaatcgacttccttcgcagatttgcaaaaagatacatctcgctttttcatgaaggctcctggctacagtaccttgcgcgttttgctctgtaaggcatcaatactcgtggagggagatgccgacgaactcgttgtgcagcgtgcataccttgactcgtacggaaggcttccgattcaggacggcattgacgtcatatcagtaaggggagtcactttcttaagatttttggaaatcgctcgaaaaatcgaaaaagatactgttgtcattaccgataatgacgggaacgtcgaagcccttcgaagcaaatacagggactatccttttattaattcgccagaagccaccaatgcccatcaagtcatttcttatgatgaaagctatctcactgaggggaaagcgaaaaaagtaaactacaatacactcgaatctgagatatacgagtcggcaggtgcggaaaagttagctaaaattctgggcagatcaaataataaccgcgatgaaacactcgactatatggaaaaacataaaaccgaagtggctctaaaaatatttgatgcaacagaaaagataacatacccaaattacattgttaaagctatcgaatgggctgccagtaaagttggcgccaagaaggttggtgttggcaaataatgtctagaatgtatctagctgcggcgggttccggaaaaacaacatttcttctggaaaaaacatcagataaaagcaagagatatctatatacaacttttacggatgagaacgcagaaaacgctcgagacatgctcatcaaaaaatacggatgcgtaccatcgaacgtgaccattcttccatggttcagctttctgctagaacatggggtgcgcccattccaaggtgccgctggttttaaagatatgcaatttaccggcatacagataaagccagaaggccgtaattattataaacagccagcccttagacattactgcaactcgtccaacgcaatttatgcggctaagctgcctgaactcgctttgctctgtaataagcagagtggcggagcagtacttaatagactgcaacgcatatttgatgctgtcctgattgacgaagttcaagatatggctggatacgactacgaattcatagaacttctcatcaattccgatatcaatataatcctctgtggagatgagcgacagaaaacttatagaaccaatggaagccgcaaaaacaagggcaaaacacttgaatgctttcttcaggaaaggaaactgatcggtagatgtccagtagatcgaaacaccttgaacggcagccacagatgcggagaaacaattatccagttcgccaacaaactatatcccacatttccccaaaccaaatctttagcgaaatcatcgtcaagtcgtcattctggagtttggcttgtcccagattcgtgcgcgcaagcctactccgataagtatcatccagtcgtccttcgcgataaaagcaacatcaaaaccatagattcatccaacattctcaatttcggcaaatctaaaggaaggacctatgatgacgttctgatttatcctgtcggcagtgtccgaaaatggctcagcaatcatgaacaagatttaaaagaacaaacatgttcacgcttttatgttgcagtcacgcgagctcgttacagcgttgggattgtccttcccgacaaagaagctaatcagctaaatgatatttatcaagtatgggaaaacacttttgagtagaaggcaacatagaaacagacaagggtcgcagacgttttcttggagataatcacgcagccattccttggctttgatggtatttactagggctcatccaactaagtgactgtttgacgcgctcatagtcagtcatgccagcggatgcgaccgtcgccagaaccaacgcttcgtcgctcagttttttcagtcgtctatctcaatcgcgtgaatcgcgacttcgccatcttccgagaactcggcttttctgaattccatgcggagttccatgccggtctcgtcgaactcaccgttcagattacgcaccagcgcatcgaccaatcagccgctagagctctcagccatattctccccactccgatagacgcactatgcttaacgcccatggtgttcgttcctttgtctgttcggtggataacatgcgggcaatccgcattcgccatgagccatgttttctccgcgagcgcgacgaggttccaacagatagagcctgcatccacgttagtaatccgccagaacgtgttcgcgcactcttgcgcactttcatgcacttttgcgcatctacgccttgattgcatattttgccattcatgcggcatgttcaattgcccactgatgtacaatactgtgcatcagtgcccatccaaggctacgtttacgtcctgaaatgcggtgggcctcttttctatctcattgctgctgcgagtagtagcaacagcttccaagcctcttagcaatgctcaattccagggcctcttccttttgccaagccgcataggcatgtataaatcaaccaatacccgccttttctgaactacactgttcctagaagagttccgtgttgaaaggggtaaccgatgacgcgcaaaggtgggtttttgaaggggatcgtcgcatcggcggcgacctatgccgtcaaaacggcggtcgacattgcggccaatccggaaaacatgcagaaggtggcgcagcttgtcagcgaacaacaggtaggcagcaagcttaagcaggccgccgcgagcatgcatctgccggccgcgcttagcccatccgcaagagtcgccaagaagcttgacaccatcgaggagacactggagcaatacgccgaccaatttcccgtaaacgcaccagtcgaacgatggaagagcaccctgcaaagccttcgtcttatggacaccatgaacagatccacaaccggcagcgagcataagaaccgcctggaaaagctccagacgcagaccgaagctctgttcaacgagatcttccagtcccttgactcgggcgatgcccagatcgaagactgaccacttccccactgctttcatacctgttccccgccactcccaagcgcaccgacgcgtctgccagtcgtatactgctaccaagtggatttgaaggaaataaccatgatcgacgacgattccaacgaactcatcccattcgaaggcggagacagtgatgccgatgccagcaccgggaacaacaatccagacgacacgaaaagcgtcaccatcatccaagacgaacaaggcatcgtcttcctcggcgacgccggtaccatagatctctggctcaaggatgaaggcttcgattccaaagcattcaaagccaaagccatacagaccgtctcctcggccagcaaaggcgcacaggcagccggcaacgccatggtcgaaagcggacgttgggtaaaactcaccaaggaatcggctgagctggtcgccaaatacggcaagaactgtaagaagggaccgttccaagccggtgttgtacggcaaccgaacgggcgcatcatcaaacatctaaaattcacccagccagggcaactcaaccccgccatgctcaccggcatcagcggcgtcatggcacagatggctctggaacaggacgtctccgaaatcaccgattacctgaaggaaatcgatgcgaagctcgacgacctgctgcgcgatcagaaagaccagaccgtcagcaagctcaccggaatctcccaatatagtaaggaatcacatgcgttatttcacttcggacacgcatttcggccatccactagtcaccgcgctgcgcgggttcctgaacaatggcaagctacgtgctgagtacctcgacatctggcagacgcagacccgcaccaccgcacacgcgtggatcaaacaatatgtgcacgacaatcagacatcgttcaaagcgatctgcgacatcgcacgtcatgagaacaccatcatcgacaatatcaacgagatcgtcgggcacgacgacgaactgtggattctcggcgacctctcctaccgttgcaccgtcgagcacacactcgaatgcctgcgccgaatcaactgccaacatctgcatctgatcatcggcaaccacgaccgcaacttccgtctccgattcaatgacatgctatacgaagacgtgttcgagaccatcgacgactactgcgaaatcgacatggaacttcccgttctcgatgaatccggcaaaataacggtggcgaccacgcagcaaagcatcgccatgagccacttccccagactctcggcattggccgaagaacacggcgactggccgagcaactggaacgagttcgccgatatggcgcctaccaccgaaggctggctgctctacggccatacgcatcaggacgttcccgacggcactgatccgcgaagtgtgaacgtgggactcgacgcatgggatttcaagcccgtcagcgaacagcagatcctcgcctggcttgtatcccggtgtgccgaccaatcaaaatgaattccaccctgagcatgaatccgggctgtaggatgccgggtcgctggtatttgtcgacgccggcgctccaggtttgcaaccattcgagtttgggacactgtcggcatgttcccggatcaacattgccgacgatgacggtgacttgagctttgagctcttcggggatgatggccgtccttgccatgttgccacgctgcgccggatcgcctacgaattcttgcggcacgcctttggctgcacgcataaactgcgcttgttcgaatggcgtcaacggcaggcaattgacgataagtttgcgattattctcggttccccctatcccaccttaggacaaacatgagataagcctttcgcatgtgagtggcgaatagattcagccgagtctgacttgaccccggctgaatcacatgtatgcgcccgtctgttcaggcaagggactcgtacgcttgcgcatcgaccggttcaagccattcgttgctcatcgcgccagggtctcctgccggaaccatgaacgccaggtgggagaaggattcgccaggagccgcaccactgacggcaccatgcgcaacaagtatgatcaagcgcaagcccaagacatgcccatcgtcgaacgtgtgcttgaagtagccgaacaccatggagtgcccatggctcaggttgcgcttgcatggcactgggccaagggcgtgactgcacctatcgtgggctgtttgcagccagaacgcgtggatgatgctatcgccgcgctaggcgtgcagcaccatgagctctcgtcgacacgtagtaaaacatatgccaacattgcaggtctcttgcgcacaaactaaaccatgcaaccggtttgattccctattagataagaacgcctcacaaccgcaaggtgtactcagccactactacatcgcggtatacatacagcaccactcatcaaaaaacggaagagtcgccaaagtcatctaaagatgactccctacgacaaataattacaaggatattccacctatgacaaactggcgctgcgaagaggaggaaaaatgaaactaatcgctatactgttgtccatcatcataatggaagcacctagctccatgaccagccctggtccttttacatcagcaaacgctctcaatacgtattccgccaagatatatcccaagtgccctccaagtctacactggctctgccgagtcttctgacatgatgacaggaaaacgcgcatgaaactgccatgctcctttttcagaagatgttttagcaaatcctcctatggacttaatccatttcatatgcagcgacaaaccgcttccggacaccggcttgtcaggaaataagttctttgacgaaatatcattcacctgatccacatgaattaaatcatcgtcatcccaaaaaacaatgagacggtattcacctcctggacttccatgcacagcgatatttgtatatagctcatgaatcaaagaaaaaacctcacgggaaaaagcatcatcaagattcttcaaatcttttagcgcaattctcgtctttccatgaaatccgagttccttcaggaaggaatccccttgctcacctacaatttgcaatccagagagactcatattgtccgcttgtactgattccgtctttccaccattcattatatcaacaacagatcgcatctcatccaaagtttctacgacgagagccctcacttctcttatttctttctcgtcaaaggttttgttcttctcagcatccaagattagaccgtccagcaaaattgccatgtatgccaagttaccagccactgaatcatgaattcggctggctaccacgctctcttttcgcaggtattcgacgtgctgacttaatttttcataccttagtttgttttgtttgagctgggcagcaagttctttccacgcaaacgtttttccgacgaagtatgcaaagaacatgacaagaattaacatgaaatactcattggccgccacaccatcagcattaaagcgccacattcgaaccaatgccaccgcgaacggatacagcatcccccacaacgactcaattcgcagccccgcataccccagagccaaccaagttccccataaaaagcttggaccaccgtcatctggaataagacagcaaatcacaaaagtaaaaaaaatgatattgcaacatataatcggccgccgcggcatcaggacaacagctaatacatgcacgcatacgaggaaaaatgtcatcacacccgcagaagggaaaaacagtatttccgcaatagtcatgatgacacaaaccgctacaagcagatattggaggtgaaatacgcaccatgaaataaatggatttactcttttagtactcacgttcattaatttccatccattgaattactgcttgagtcctatttttagcccctaatttcttcatgacccttcgaatatacgttttcactgtaggttcccctatgccaagcttgatgccgatctcctttgaggtaaaacccagggaacacagccccataacctctcgttcccttttcgcaaacgtttcatagttgacatttccacttttggcagtcaataatctctcatgcgactcctgcgcactttcggaagatgcatatttaacatccgcccgccgcccattcactattgcacataagacatggcaaagacctttcacattcgccttatccacaagacagctcgctccgttttccagagcaggtacacagtaacggtccagagaaaaagcagtcatgcccactaaatcaacctgagcagtctcctcacgaatggtccggcacacatcgcaaccgctcattccctctagagacatatccacaagcaatacatcaggacgcgtccgcgagttaagactcttactcaccgcggtcagaccatccgatacagcccaacacacgttagcctgcggaagaatacgctcaatcatcatcttcataacgccaagcgtcaatctgtcattgtccacgatagcgattcttattcgttttcccaaatacatcgtcactcaccttcacccctaagcatacaaatatagccacgcattgcatcacgtacaggccatcacccagccagcagcaatagctattttcaaacacggaaaagcgaaaaatcctcattttccagaaccggcatccaagatccccattcccctgatcgcccagaatcacttaacgctaaaagcacaccggccgatcccgtccccaaatccatggaacacttgtatccataaagtcccgggaaaacaatgtttccattgttcttcatcaggtaaagattcaatccatcaataatccgctcccacagctcatcatcaatacctaagtcgcgcaacgctattgcagcaggcaacagtcccacataacccccgaataagccaccattaaacgtgcaaaccatatctgaaccttgggaaagccttctaagaaactcctcattaaggaattccattgactcattaccatctttatagacttcaataaaagctagggccacaccagaagttccacaatccagataaggcattgttctgggtttattcttcaaatgatccacgtaatacatcggacgctccttgttatccgcattggcaagatgcgttagcgtaagacgaaaaatgctttccgcacgggagcgcaaagcatcgtctttcctgcaaagagaagccttccacaggaacagacctgcacccaaccagcccttcattaaggtaaagtccgctttcgaactcagcatgtcttgcgaagttaaaccacaatcgcatctctcatacaccttggaaagaatatacgacaacattttttcttcatgcgagttcctagatgctcccaatgacagaagagccatgccaatgccagacaaaccagagtacaaggaatagtcgtcaatgcctgccaaataatcaatgtgagagattccgatataagaaagcattttatgacattcctcgcgagaaaacacctcatatgcagccatggccacacctaccgtaccgttaaacaatcccgcgcggaacgacataccgtctttcaatttacgtaataccgatatatatttctcccgcgcaatagcataaaaccattccgagttttccaaacatgaagatttcagcaaagccaagctcacaccggcaaaaccagacccaatgctatatttagacatctcatcgccatacattgaaatatcacctttgacaggatattcacctcgcaagtcaagaccagagacaatccctttataaagaagtctcataaaggtttcaatattctcaggatctaaaagcttgtcacaagcctgtaacgctttgtcgataaatggtccatgagacaataacggagtcaagccaagcattcgcgatctgacagaccgaagaaaagaaactgcctcattcccaaagtgcttttgcaccatataatcctgacagaacaacaacgaaggagccagataatacaggggacatatgggaacaaaaaggcggtgcactataaccgcgaaggcataccaatcttgttgttcatagttgcatacagcatcgttggtaaatcctggagtagcgatatctacttgaaaatcttgggaaagttttttcgccgcctcaaaatcaatcagtttaatttctaaagaatcattaatcagcacatttgataagctcaaatctccaaccgcaaatccaattccatgcattttcgcaattgcactttccaatttggttgcgatctctttacaccctcgccaataagaatcagagcaatccgtccgagcagagcatccatcgaaagggaattccattgctatgtactgctgcaaatctcgaccttcaaaaaaatcctcaactaaaaatgcatgattccagacatcaaaacaatcgacagcattcacaacatcagagagcggactcaaggaacgaaggatttgatattcatgcttgattcgatgaaaagcatccaaacatgacctatcactgaccccaacattttttcgcccttctttaaggatatattttttgccgtttcgcgaagcgagatacaccccaccgttattactaaaatggacagcggagtctatttgataatccgttaattttccatttgagtattcaataaaataattattctctttaacatatataggttcatcaacgaaagaaggcaaggaatacagcggtaattctttatccggtattaaatcaccctgaggagtcactatcacaggtacattcttttcgtttgaaaagcgcggcttcagagcaccatatctgaaaaatacattactattttgccattgtttatcagttaagatataaggaccatcatcatatttacaaacaatggtttttaaatcttttagtagctgaataaaaatatgttcagaactggggtaaatagttatgaatttacctgactcaagtctatccgcatattttccattcgcctgaatgaaacaagttctacttgaaagatatttaaaagaaatagatttaacgaaaagatattcagcaacatcatagagaacattctgagcatcataaattgtagaagtgatatgaattttccaaccttgaggaggaaaagagtacatcagacaattgacataagtccaatgcccatcagacctaacgccccattgctctgagttgtcattcgtcggcaaaacataagcatcttcacaagcataaacaggttcgctatagtatatggtctccttatctgccgagaaacggaggtaatcatccgccgagtaaccaaccatcacaattccctcttcccctatatcaatccttcaagagttgattttgaacaaaaaatctatacgctggacatctttcaatgagctctcgatgatccccctgatccaaaagataaccatcttcaataaagaaaataacgtctgagtctattatcgtagacaagcgatgtgaaatgacaattgaaatatcatactcatgcgatcttaataggttatcaagcacacgtctttctgtcttcacatcaagattcgacgttgcctcatccaaaataagtatcggagctttccttaaacaagctctcgcaatctgcaatctctgtcgctgtccaccagacaaagacatcccctgctcaccaacactcttttccaaatcaccaacggaaataatttcatctaagcaagcatttttcaaacatttattaatgtctttttctgatggcacaaaatcaagaccaaaaaataaattttctttaattgttgtagagaaaaggagattatcttgagagacgacagtaaaccaccttctccactcttctagatgctgcccatcaagcaagctctcattgatagcaatggctccagaatttgcactatatagacctgttattgtattaataatagtcgttttcccggatccagatggtccaataattgcatatcgaccacccttttccaacctcatactaacatcatgaagaacttcattatcattgtaaccaaatgaaacgcttttcagttccaaataatcaacattattatacgcaaagttttccatatctacttctcttgagatccgatgacacggttgattctttttaaggaacctttgattgtttgacaactcaaataaaaggtaaataaaccacctactggagtaaccagctgaaagaataacattacatatgcaacaaacgaaccgtatgtcaagagatgtacgtccatcagatgaacaccatagcaaacaatgaccccagtacaaaaaatcgaaatcagattttgaacgggcgtaacaaaagaatatactttgtcattcaagagattaacttcttttatttcatttactcgtttcttgaattttagaagcatacatctctctgcattacataacttaacagtgcgcatacttcgcactatttctgaagtaaacgtatttaatttaccaattctctcttgcagcatcatcgcatttctgttattaaatatacctaagggaacagccagtatcatcactgcaggaaagataattagaaccaaaatagatagtctgtagttaattacagtaagagcaacgacggaaaacagtatattgataacactcgaaacaaactgaggaatactagccgccacaaaattcctgaccagagagatatcatatactattccactggcgatttcaccgctattttcattgtcaaaaaagagcatatctttctcaaaaattatatccatagcctgaatacgcaattccgccacatgaagatcggcctcagttgaaattagcaatccaccaattgcacacaatatgaattgcgccgcaaaaagaaaagggaatacatacagtaaactaagatcaaattttttattatctataaaatcttttatcaaaagaggaacaaagaatgataacgtcgatccagcgatactgcaaaccacgccaagaatcattctcttgctaattcgcataaatttaagcatcagatttttccgccaaatattttgtattagttttaagcaactttcctttactgcctattctaggtttaacatcctcatcaccaacttcttcaggttttaatcctaagctttcaacaaaagcatctgataagtcatcaagcgccatatccttcattgaccaaattctcttatttaccctaatcaatggcgtcgcaaacccctccctccctggagctattaggtcgcttcgtagtattgtgtaatcattacttttttcaatccattcatcgtactgtccatttaaactttcctttgcaatttctctagatattcccgctttaatcgcttgttcgattatcttttcatcagacatttctacataatctacttctgaaggctggaacttttcatcaaatatttctgaaatgaatgcaacgacatgctttggatcttttcctgaaatgtaggctatggatcccgatactctggccgaataatggtcagatgaacacttgtctaaaaaaatcacaggatgaatttcaagcttaatctgaccactcgtatacatttttcctatatcatcatttaatgttctatcaatttgtgcacaagccggacataggggatctaaataaaattctacagtcggaatatctttttttgacccaacttgcaccagtagcccgccatcatttgttgcgtttgtaggttttcttttcacttctgataatgactcatacgctttttttatatctttagcgtcacttgcactgtttctagacatgaaaagcccaataaatgcactggcgagaagtataataattataaatacagtaaacaatccgagaattgtttgcttttctctttcattcaatcttttcattacagcatccatctatcaaaatggctatctgttaacttcaaaacagatagccactgcagtttaaaactgttgctcttctacttcagcagaaccaactccacgaactatgccaatgatgcgtattcggatcacaattaggatccgtcgaacaatttccatgcgtgtcaacacatggtggccttttagaggtcatacttgcaggttgcgcaatcaaagcctgtaaactgagcaaatccttcatttccactcctttgaacttccagactctcatcacagcgaaacagatagaagtccagaaacatttcttccactgacgaaacccagtttgacacttttctcaatttcgtgtcttattcactctcttatgtcatcccttagatgacatttcaagccatatatggatctaccatttttgacatgtaacggctcgtttttcatgatgggttacagacatcattgtctgtaacccatcacattgcgaaacggccatcagaacctagaaatcagccctagaaaggactgggcatactctcttcacttgttgccgtccaaaattgccgatagatcgacaacccaaataagtgaatgctgtccatatactgacgcttttccgaaaatatcactttccatacaaggcagaaacgttcagcaacgcccctcatacaagaagaaggaaagcgcgccgtcttccagaccgccttgcgtaaaggagtccctgcgtacagtacgttccgctttacgcgtcaaaccacggtaatcataaaaaccgtaatcgcaggtagtgtcagtgaagaggaaatactcgttcattccagcatcacgaaacacgtcaagcatgtggttgaacagcttacgaccgacgcccatgcccctcgcttccggggaaaccacgaacagcgttacctcagcctgatagcttttgccggcatctcgcttcaacatttcatcggcctgcaaaatcgcaatctgatcggcaagtcctcgacggccatccttgcttgtcaacaagggcaacgccaagcaatttcgcgtaatagcatgacgtatcctctgcgctgtggtaacacgggatctcaacgagcccaataccacgccaagcacccgaccatcacgttcagcgaccgtagcctcggtggtgcgggaaagaaaatcatgcatgtcgatggccgcgagtcgatgcatattacgcaagtgaatcgccttgcgcagcttatacttacgcaacccgcgctcatcgttcggaacattcccattatcatccgactcatcatccacataccaagcctgacggacaagctcttcaagcgcgggaaaatccgtgcgacgcatcggtcggagcataatcatttctgaagtcatgctcccccatcctagccgcagccataccaaaactccgctcacggatgacataatgcgcatggtattgaaataacaggaatgcgtaggatttgttggcattggcatgtgaagcttgggggtctgggggtcacaagtttaggatgagacaggattgcgtgtgacgcgcaatgaatgagaggttcatatggcaacgttggttagacgaattgcgggcgcgctatgcatagtgctcgccgcggtatgtgtttgttacgctttcgcagtgcgtaacacgcattccggcacagtattctggattgtctggctagcattcgcggcgctgttcgccgtgcttggattcggagtgctcttccaatggtgggcgatgctgccaagactggtcagaggtgtggcgatcgcagtcgcatgcgtcggtctggtcgcattcggcacggtggaaggttgcatcgtcagtcaaatgcatgcgcaaggcaaatcggatcttgattatgtggtggtgctcggcgcccaagtgcgtaagtccggcccgagccttgtacttcgctaccgtctcgacaaggccatcgaatatttggatgagaatccgaataccatctgcatcgtttccggcggaaaaggaccgaatgaaccgttccccgaagcccaaggcatggctgactatcttaaggaacatggcattgccgaacagcgcattcttgaggagccggagtcaaaaaccactgaggaaaacattgtcaacagcaagaagctgatcagtgacgataatgcttccgtaggggtgatcaccaacaatttccacatgttccgcgcgttgcagattgccgacaaatatggtttggacaacgcccaaggcattgcggctggctctcccccgaacatgctcgtcaacaatatggttcgcgagtttttcgccgaaatcaaattcctgctgtaactcatgtttcggcaatctctgtcttgccctgtttaaggatgccgaaaccgaatacgaaataaattgaggggtggaatcccatatggatttcacccctcaacgctttagaaagatgactctcgcaagtcaggcattaagcgagactcactcttcggaagcgagttcgtcagccacagcggcggctgcggaagcagcttcaacgctctcggcttcttcatcttcagcggcttcgccgaggaaggcgctcaaatccaaggtttcaccctcggacttgaaggtcacggcacgcatgccggcaagcaggcccttggaacggccaacttcctgcactgcggagccgagctggccgttgcgcatgatggcctggatgaaggcgttcggatccatgccgtactgctgggcgatggaagcgaggaagttgaacacgtcggactgggagaccttgacgtccagcttctcggcgagcacgtcgagcaccatctggtcgcgcagttccttttcgacggtttcttcagcttcggccttctgctccttggtggcattggccggatcagcggtcacgcccttgagctgctgctcaaccatttcagccttgacgcccttcggcaccggaatctccaggccctcttcgagcttggcgatgaaagcgtcacgagctgcggtggcctgacgaccttcggcatcctgggaagcggccttcttgaggtcttccttcagctcgtcgagggtgtcgaactcagaggcttcagaagcgaagtcgtcgtcgagttccggcagctcttcagccttgacggagttgaccttgaccttgacctgagccttctcgccttcgtgctcgcctgcttccaaggtaccttcgaaggtggtctcttcgccggcggacaggccttcgagagcctcatccagaccgtcaagcatggtttcggagccgagctcgtagctcacgccttcctgggagtcgaccacttcgccgtcgatttcggcggtcaggtcgatgttggcatagtcacccttggcggccgggcgatccacacccacgagggtgccgaaacgctggcgcagggcttccagacggttgttgatgtcttcgtcggtgatttcggccttggcgacctcgatctccatgccgtcgatttccggcagttcgatgtccgggcgacgctcaacggtggccacaaacttcagcttggtctcgtccttggcggattccggaacttcctgaacgtcgatttccggctgggccatcggacggatgcccttttcttcgagagccttggagtacagctccggcacaccgttgttcacggcttcgccagcaacggcaccgaagccgatgcgctggtcgatgatcttgccgggcacgtggcccttgcggaagccaggcacgttgacctgcttggcgatttccttgcgagcattgtcgagatacgggttgaactcttccggatcaacggtgacggtgagcttcaccttggtcggctcaagattcctgacgctgattttcacgcttgcgctcctgaaaaatacggttcttcacatttctgccgttaggcaacctctacatgatagcgcgactcacggactctgcaaccagcgcgacctgccacgccctcgcgccctgctcggtgaggaattgcgcaacgtcacgtttttgcggttcgtcggtccaacacaggttgcgcagatactgcggtttgatgatgacgtccgcgggggtacgcgtgtcttccgctatctgcgccaccatcttgcgtgccttgtcaagcgttgcgagacgttccggataacgttccctccagactcgcgtcgctcgtggagcggatatgctctgcgcctcctggttttggggattgccgctttcgatgaccggccattcgctttccggcagatcaagcgcctgttggattattctcttccacatgcttggcttgattttacgttggatcggcgcgtaacgttcgaacattttctcctgttcggcaccggcttggatgcgtacacgctcgttgatggaacggaccgccctgaattgcgcggcgttatgcggcttgcgttccgccacttcgatgatggtgctgtcggcgagcagcagtgtcggcgaaatatcgtattcgcgtgccagttcatctcgtttggtccataatgctttcgccacggccagggcctggcggtccttcatgatttcggtgatatgtgaaatacgcagccatgggatgggatgctccttgcgtggcgcagtcccttcgcgcagcgcgtaatcgaattcctcctcagcccattcgatcttgccttgcttttgcagttcggcgcgcatggtcgtttcaagctcgatcagcaattcaacgtccagcgccgcataattacgccagtctcggggcagcggcctgtacgaccagtcggccgcggaatgctctttggcaagtgtcaatcccaagtaatgctccgtaacggcggccaaaccgaaccgtttcatgccgagcagtctcgcggcgatctcggtgtcgaacaaccgctgcggcttcaatccaagatcattgaatcccggtagatcctgcaaagaatcatgcagaatccataccgcatcgcccaccgcacgattgaaatcgttccaatcggcaccttccgcagccaatgcctgcggatcaagcaatcctatgccggcaccgtctcttttgaattgcaccaaccaatcgtcatgaccgtatcggaagccagacgcacgttccgcatccgcagccaaagacccatgcgaagacgccaatgcgctgcagtactcgcggaatgccggtagggtgtcgatcacatcgggcacgccctcacgcggctcggcctgcaaccttggctcgtcagtcaacgggataatcctcctcggattgcgtcatggaccggaggaacctagcccacgcgcccacttgggcgcccgcgtcaaggcctccatcggcatagtctagtggcgtccaagacacacgaatctcacatccggtttcgggagcgtcggactgagtgccaaacgtcgtgcttttcgtgactgtgacggttcccgaaacatgttcgacatcgtacgaaccgacacggtccatcatcgcatcccaatacatggacggtatcagacaatcgccttcgcctccagacaacggcaacgcggcgaaagcgacgcaacgccaatgagaatgccagtcatttcggtatttgtgcgaatacaacaccatgatccagcctgtggaacgcgcctcgtcgcattgcatctcaactccaatgccgaaactcgccatggcgcacggcactggaatctcacgatacgacacgcttggtaatcgaggcatacgttctacggaaagcacggcgtcccataccttgtctggcacgccggaaggtcgggtcaacatttgttcaggagggtcggcgtaggcgcacgatcccctacctgtggcacgcgcttcgttgggcgtgccttgaggaaaagcatagatgtccaccatgattcaaggctacggcagagtcgccggttttgcggtatttcacagcatttcgccacgcgtcgaatgtgaagattttttcgcgtggcgaatgctggttcaacaattgcacgaatattcctttttccaatcgctgaggcactttcaaacgattgatttgccggaatcgttggctggaatatgcgtggcttcccgtttagtagacggtgaagccgtgcgattggaattgttccaccacacgctgtttcattgcctcggacggccccttctggtcttccaacgggtagggaatgttgagcatatgccattttggacggccaagctggtggaatccaagcacatcgatatgttccactgcgtcgccgaacgactcgcagatcttcgccacattctcaacgttttcctcggatgaggtgagtccgggcacgagtacgaaacgcacccagatcttcttgccggccttggccagacgctgtccgaaatcgatggtcggttgcagaatgccgccagtcaccttcttgtaggtttcctcatcgccagacttgacatcaagcagacacaggtcgatgtcgttcagcatgtcgtcggtatagcttgcgccaaggaatccggaagtatcgaggcaggtgtgcacgcccatctccttggccgcacggaacacgcgggagacgaatgctggttgcatcatggattcgccgcccgagaaggtgataccgccatgcgtcgccttgaaaagatccacatagcgttcgatctttttgaccatggcctcgtaatagacgggcttgccgtcacgcattttccacgtatccggattctggcaatactggcaacgcaatgggcaaccgctcatgaagacggtcatgcgtgttcccggaccgtcgacggacgtgttgatgtcccaggaatgcacgaagccgatatcaccgcttttcagcgcgttgatgcggtcacgccggtccaggccgatcggcgattcgaagcctgacagccctcccataagcgtttggttgacgtagttttgcgattctctgagcatatgccttgttgtggagcgaaaatgtacgttctcagacatcggtgtcctttcgttgtatctctccaatggtttccccacattgtacagggaaaaccaaggggcgaagctttcacgctccgccccttgcactctaccgcttcacacggtaccgttcagtctcagtcgacgacggcgccctggtggaacgtacgggagatcacgtcgagctgctgctccttggtgagcttgacgaagttcaccgcgtagccggagacgcgcacggtcaggtgcgggtacttttccggatgctcgacggcatcctcgagctgttccttgcgcagcacgttgatgttggcgtggtacagaccgtggccgttgccggcgtccagaatgcccacgaggttgccgatgcgctcatcctcgtcgcggcccaagccatcaggggtgatggtgttggtcagcgagatgccgtcaagagcgtcgttgtagtcgatcttgccgacggagaacatggaaggcagcatgccatgggagtccatgccgttctccgggtttgcgcccggagcatacggggtgcccttcttgtggccggacgggaaggcgccggtggccttgccgtattccacgttggaggtgatggtcaggatggactgggtcgggaccgctccgcggtacaccggcaggcgcttgacctggcccatgacggtggagacaacccacttggcgatctcgtcggcgcgatcatcatcgttgccgtacagcgggaactcaccctcggtgcggtagccgacgatcagatcgtcatcggcgccttcgacgtactcgtcctcatggcccggagtggtcttggcgtccttgttgtagatcgggtagaccttggcgtacttgcatgcggacagggagtcggctgcgatggacaggccggacataccacaaccgagggtacggtacacttccttgtcgtgcagagccatctcgatggactcgtatgcatacttatcgtgcatgtaatggatgatgttcagagccatcacgtaggtctcggacagccattcgagagccttctcgtagttggccttgaccttctcgtaatccaatgagccgtcggattccggctggatcggctcgataacgcccttgtcgatgacctgcatgccggtcatttcgtcgcggccgccgttgatggcgtacagcagagccttggcggagttcacacgagctgcgaagaactgcatctgcttgcccacgcgcatcggggagacgcagcatgcgatggcggcgtcatcgccccagtgggagcggatttccttgtcggactcgtactggattgccgaggtgtcgatggagatcttggcgcagaagcgcttgtaggcttccggcagcttcggatcccagaagatggtgatgttcggctccgggccaggtccaaggtgctcgagggtcagggtgtcgagcagacggaaggaggtcttggtgaccagcgtacggccatcatcgccgaagcctgcgtcggaccaagtcgcccagtacggatcgccggagaagatcgcgtcgtaatccttggtacgcaggaagcgcacgatacgcaacttcatgaccaagttgtcgatgatctcctgtgcgtcggtctcggtgatcttaccggacttcaggtcacgctcgaagtacacgtcgaagaaggtggagacgcggccgaacgacattgcggcgccatcctggctcttgacggaagcgaggtagcccatgtaggtccactgcactgcttcctgagcggtctgtgccggacgggacaggtcaagaccatattcgttgccgaggttgatcagctgcttcagggccttgatctgctcgtcatgctcctcgcggaagcggatccagtgctcgatctccggctcggtgaagtcgttgcggtacggcacggagtccttgtcacgctgcttgaacttgatcagggtgttcacaccatacagtgccacacgacggtaatcgccgatgatgcggccacggccgtaggcatccggcaggccggtgaggatcttgttgtggcgggcaaccttgatctgcttggtgtacacgccgaagacgccgtcattgtgggtcttgcggtacttggtgaaaatcttcttgatttccggatccggctccttgccggcttccttgatggcctgctcgaccatacgccaaccgccgttcggcatcatggcgcgcttgcaaggaacgtcggtctgcagaccgacaaccacattgtcgacttccggagagtcgatgtaaccggcgccgaatgcgtcgatgccagccggtgtgtgggtgtcgacgtcgtagacgcgctgcttgcgctccacggccagatagttgtcatcgaggtactgccacaggtgcttggtcttctcggtggcgtcagccaggaaggactcgtcgccctcataaggcgtatagttcttctgaataaagtcacggacatcaatgtccttctgccagttgccctcagcgaagccttcccaagccttagcctgaagctcttccggggagactgccgtcgcatcaactgctgccatttccactccttctgggtgttggtttggcgacgcatcgttacgtcgtcgctagttatcgattctagctgcataaacctgtatagaacctgagtttacgaggaaataaaagtgacatatgtcacacttgcgaagtatgaaaaatcgcggtgccgtaatccggacaccgcgatttcttatatcgcatcaactacttttcatcggaagaccagcgtttccattcgcgatcctgttcttcccatttgatgttgcgttcctgcacgatcttccatgcatcgagcgcgtcttccctggttttgtatggtcccatacgatggctcgccggtgagatcatgcccagttcaggctgttcggtaaccgtattgaaataccattgcttttccatatcactccttacgaagcgcgtaacgaaacaatagtccgccgctgttctattcgcggaacgcgttggtaatcggcaagcggcggtcacgtccgaacgccaatgccgtcacctttggcccaagcgggtattgacggcgcttccattcggcacgatcgaccagtcgcataaccgtgtcgacggtggtctcatcgaaaccgtctgccagaagatcctcacgaccatgcgcatgttcaatgtacatcgccagcacctggtcgagcagctcgtactccggcagcgaatcagaatccttctgccccgggcgaagctcggcggacggggctttctcaatcgaattgacgggaatcatcacgccatccggcaaaggagtcccagcaagcccctgttcgttgcccacgacatgcaatccgccgatgcccatgcctgccgcggcggccttattgcgccagcgagagatttcccacacacgggtcttgagcagatccttgattggcgcatatccgccgaccgcatcgccgtaaatcgtggaataaccgcaggcaagctccgacttgttgcccgtggcgacagccagaagccccttggaattcgaatatgccatgacaatcacaccgcgaatacgcgcctgcaggttctcagcggccacaccttcaagatcgagctgcttctggaaggagacgaacagcggttcgatgggctgaatgtcgtagtgcgctccaatattcttcgccagatcggcggcatcatccttcgaaccgtcagacgagtacatgctcggcatggaaatgccatacacgttagctcctcccacggcgtccgcggccatggccgccaccaatgcggagtcgatgccgccggaaaggccaaggcacacgcccttgaaatggttcttggccatataatccttcaagccaagcacgcaggcggtgtacacctcttcgtccggatcgggcttggctgcgatagatccagctttctggcgttcggcagtggtgtcgaggtcgaagaagctcagatcctccatgaacatcggcgaacgttccagcagcgtgccatcggcatcgaccacgaagctgccaccgtcaaacaccagatcatcctgaccacccacctgattgaggtagaccatcggcgcgttcacttcagccgcacggcgtaccgcaagatcgagtcgagtatcagtcttaccctcctcatacggagaaccgttcatggtaagcagcaaatcaatatgctgctcggcaagttctgccacaggaccgccatcctgccagatatcctcgcaaatagccacaccaatacgtgcgccattcacatcaagcaccatggacttattgccaggactgaaaatgcggaattcgtcaaacacgccataattgggcaggaagtgcttgtcatagccgtcccaaaccacgccgtcatgcaatacgacgagtcggttgcgtggcttggatgtctcgcgatcagtgccgaccgtgccaaccaccacaaacaggtcgccaagcccatcggcagccagttcggtggcgagccagttggctttgttccacgcggctttgcggaaggtggcccgcagggcgaggtcttcgatgggatatccggtcaatgtcatttccgggaatacgacgacttgcgcgccctgttgcgcggcgcggcggacgtatcgcatgatcttaccggcgttggaatcaaggtctccgacgcaggtgtcgatttgagcgagtgcgaagcgaatgtctgtcatagctgcctaacctaccgttgatttgttgaacgttttattttcttacgatcgcgaattgaaagcggaccgcacgcgtgtcacgaaagttcgttgagcaccgtcagcgccgcgttggcgtagaattccacgccggcctgcagtgattcatccagaccgacgaaatgcgggctatgccaatcggggcagcctttctcgccattggaaccgatgaaggcgaacaccggcatggtgacgggcatgaaatcgcagaaatcctcccccgccatcgaaggatggattggctcgagctgcgcatagtcgcgcacgttgtcagcgacgattttggatagttccatgtcggagacgagcggattctgaaagtcatcccagtcgatgtctgtggtaatgccgtagcccgcggcgatggattggacctgctgcttgaagcgtttctcgaccagttcgccgtcggacttatggaagtagcgtacggttccttggaagctggccttgtccggcacgacattccacacgtggccgccgtgcagttcggtgatggacagcacgagcggatggaatggtgagacattgcggctgacgatggtctgcaaggcgagaatcattgtggcgagcgcctcgataggaccagtgcccttgtgtggatatccggcatgtgagccggcggcatgcagagtaacgtggaatttcacgcagccggccatcatcgggtcggggcctacggcgatctgtccgggcgcgtaattcggattgttgtgggcgccgatggcggcggatacgtcggcgagcaaccccgcatcgaccatagctttcgcgccgagaccgagctcctcggcaggctggaacagcagtttaatggagcctttgatgcgcttgcggcgttttgcgagccagaatgcggctccgagcatgtaagacatgtgcaggtcgtggccgcaaccgtgcatcacaccgtcgttgacggacgagaacggcaggccagtatcctcttggatgggcagaccgtcgatatcggcgcgcaatgcgatgcgcgggcctggttgctcgccgcggatcaggccgaccacgccggtttcaagcgggttgttgagcacttcgatgtcgtgcgcgcgtagcagtttctcgatataggcacttgtctcgtattccttgaaactgcgctcgggatgtgcgtgcagataatgacggatctcgatgatctccggcgtgatctcaatatgttcgctcatggttgacgattgtaggcgcaaccggacgtttttcctattttcgtgttcgtttttcgtgccgacaatggcgttttccgcagtttttccccgtaagctggatgacgttttgaacggattcacggggagatcggcatgtcatcggacatcaaggctgcgtttttcgatatcgacggcactttgacgagtttcgtcacgcatgtggtgccgcgatccaccatcgacgcattgcatgcgttgcagaaaaaagacgtgaaggtgttcatctgttcggggcgcgcaccctcctatatgggtgtggtgcttgacaccattcccgtcgaatttgatggcattgttggccttaacggccagttctgcacaacacgcgacggcctcgattaccgtcatccaatcgacctgcacgatgtggagatcatcaccgactggctgcaatcgcataccgatgtcgtcgccaattacgcggaaagcaactacgggtatttcaatcgcatcaacgccgctttggaacgtacgtggaacagccttggcaaaaccgcgccgaaaatcgacatatgcaatccgcagcaacgtataggaaaccatcgcacattccagatcagcccatatgtggataaggcaacggaagcggaaatcgccggcatgtgcggcaacgtgcgcggtgtgaggtggcatcccgacttcaccgacctgattcctgcggatggcggcaaggcggtcggcatgcaggtcgtgcttgagcattttggttggtcgagggacaatgcgatcgcgttcggcgatggcggcaacgacgtggatatgctacgtttcgccggcataggcgtggctatgggcaacgccactgacgaaccgaagaccgtagccgattacgtcaccgacagtgtcgacgatgccggaatctcgaatgcattgcatcattttgaaattctgtagaaaaggtttttaagagttttcttgcgattctataagacggttttcgcgaatttctgcgtttttcatgccctttataagtattttcaataagtgaacgccgtgttgccgtcgatggttcctctatattggtcaatcgttgggtccgccgcgtggcaaacgggcggcccgtatagcgaattgagagaggaactcaaccatgcgtaacaagaagcttctcggcgcgctgctcgccgtcaccacgctcgcgaccttcggtctggccggctgcggcgactctggctccaacggctccgcctccaaggaggatgacaagaccatcaccgtggcggcctccccgaccccgcacgcggaaatcctaaacaaggccgtcaagtcgctcgtcgagaaagatggttataagctcgaagtcaaggagttcaccgattacgttcagccgaacaccgccaccgaggatggtgaagtggacgccaactacttccagcacaagccgtacctcgacaacttcaacaaggagaagggcacgcatctggtgtccgtggagggtatccacttcgagccattcggcctataccctggcaagaccaaggatttgcagaatctgcaggatggcgccaccgtggccgtgccgaacgacgccaccaacgaggcccgtgcgcttctgctgctgcaggatgccggtctgatcaagctgaagaatccgaaggacatcaacgccactccgaaggacgtcacctccaatccgaagaacctgaagttcaaggagcttgaggccgccgtggttccgaccgtcatcaaggatgtcgacatcgcggcactgaacggaaactacgccattcaagccggcttcgacccgaccaaggacacactggtcaccgaaaaggccgacggcctggccgcgaaaacctaccagaacatcctcgtggtgaaggaaggcaacgagaacaccgccaagaccaaggagctcaagaaggctttgaagtccgacgaggtgcgcgactacatcaacaagaactacaagggcgctgtggtgccggtcttctaagacccgcttcggctgcaagaattcaatgccgcaggtatactaccctgcggcattcttgttatggaacatcaataggaacaggacattatgacgattcagatcgaccatctgcacaaaagctatggcagtggcgccgaggcgcatgaggtgctgcacgacatcaacctgaccatcgattcgggtgaagtcttcggcatcctcggctcctccggcgcgggcaagtccacgttggtgcgctgcatcaatctgctggaacgtcccacttccggcaaagtgcgcgtcgatggtgaggacatcaccgacgcgaaaggcaaggagctggcggacgtgcgtgccggaatcggcatgatcttccagaatttcagcctgttccagcagcgcacagtgctgcgcaacgtcacgttcccactggagctcaaccatacgccgaaaaacaagcgcgaggagcgtgcccgctatctgcttgacctggttggattggccgatctggccgaccgctatccgagccagctgtccggcggccagcagcagcgcgtggccatcgcacgcgcgttggccaacaatccgtccatcatgctgtgcgacgaggccaccagcgcactcgactccaccacgactgcgcagatccttgacctgctgcgccgcatcaaccgcgagctcaacgtgacgctggtcatcatcacgcattcgttgtccgtggcacgcaacatctgcgaccgtgtggccatgattgatggcggacgcatcgtggagatgggcgatacggaggaattgttctccaatccgcaaagcgacattctgaaaacactgatcaccgatgcgaaagtggagaaccatcgccataagcatgattccgcttcgtccgatgagcagacggactcgccgaccaaggaagaggtgaagtgaaatgggacagattatctcgcaattcatcgccgattatggcgaactgctggtcgagggagtacgtgacacgatcatcatgaccgcggtagcgacgctactcgcgtatgtgatcggcctacctgtgggcgtactgctcatcacctcagcaaagaagggcatccgcccgaatgcgacactcaacaccgtgctcggctggatcgtgaacatcgtgcgttccgtaccattcatcattcttctggtggccatcatcccgttgacccgactgattgtcggcacttcgctcggcgtgccgggagccatcgtgccgctggtcatcaccgcggcgccgttcgtggcacgcgtggtggagcagtcgctcgccgaagtggacggaagtctggtggaggccgcgcaaagcttcggtgccagcaatctgcagatcgtgttcaaagtgctgctgttcgaaagcctgccgtcgctggtgcgcggcgcagcactgacgttcatcaccctgttcggcttctccgccatggccggcaccgtcggcgcaggcggtttgggcgatatcgccatccgctacggctaccagcgttaccagtacgacgtgatgaccgtggctgtgattctgtgcgtcatcctcgtacagatcgtgcagaccatcggcgacgtggcgtccgaccacatcgaccatcacgagcgctaaaccgacgctttcatgctcctatatgcaagaatcgggtctgaataattgtgttcggatccgattcttgtatgcgaagacactgctacgtggtgcgcttacttgttgagttcaacaactcaatctatgatataacctgtttttgctccgcatttccccgactcgatgggagatgatgggattcacggcaaggacactctaccatgcaccgaaattcaagtcagaaaccaatcagtatccggctttaatggcggtgatggtcagctcgccacggttcgtgtacccgagcgccgtgaaaaactcggatatgcaggggcgcacagtggtctcgctcggtccgagccgtttggcgatatcttgtttggtggcgcctagacaagaaggaacaatcccactgccatgtcaggtatggtaatctcaaaacaccgtataacctcgaaccatccagaacatcgataaactacttcaaagacaaaagaggcgcggcacgattgcaggggcattgatgacaggaacattaccaaaacagcataaagcggcgcgcattatcgagcatatcgtccttgtactcgcactggtctgggccggcggctgtaccctcatatggacgcaaatagacatgccccacagcatcgtgaacacgacatcctctgacggcacctgcgaagtggccatcggcgaactgggctcgcccatgttcttcggcccaagcaccatcacgatcaaagtctcctgggacaccgattccaacgtcatcggagccgagaacgtcacagaaatcaagacggacctgcacaacgacggcaaatcattggactcggacaacttcaccgtaacctggcacggcaacatcccgaccgtcaccacccatggcgaggaacagtcggaccagagctacacgttcaactggaaataaccaccccggacatcgcgcctctccgagaatagtcctcacggccgagcagatcccacaggggcataagcatgaaaatcatgactaccatcatcatgcgcgcctccgatgataatcgtggtcagctgtttttggccttattccaaggttttcaatttttgggaaacctgccgatcagtctcgtcttccacgaggcacctacaggcacccaaaaataatccgggaacgttccaccaccctgccggcgctcagcgtcttcgccgaccggcacggaaaagtgcaataccccctgtggtttcatgatgttccgcctgggtggtgcccagaagcattcgcccggcagcacgtctccatggcggacaatagacagaacgatacgcggcccatacaaccgtcccagccgccaatggcaccccgaatcccacaggcctattgcagacagcccagatcagctggctcatagtccaaagccgcctgcgacgccaccgtcccaatggcaggaacggtcagctgcgcagtatgatttccgccctgtcggccagttcccgttcgcgcacgcccatagcagacaggatcgcttgtctccgcgacggcatggcggaggtcgcccgtgcgaccaatgcggagaagcgaccgaacaattccaagtaatcgtccttgtcaagcaaatagccaagatcaccgatggcctggtacacgttctcgttagcgcgcccatcgtaccgggcacaatagcagcgctcgtcatgcgcgcacaggttgcggtagaacaccagtctgttgaagatgctgtccaaccgcttgatggtgatacgccgcggcccgtcgtgcgtgtccgcatacaaaccggtgaaactttcggcgaccgccaatcggacggccggggactggacttggaagaaccataccgtctggccgaaagaaagatggttggccagcacccacaacgggacctggccgttgtggtcttccatgcaatggcggatatacgccttgccgccatagtcgcccctgttgcgcgggttgccgtccaactcaagtatccgcttgaagaccttgtcgatcaacgccacggcgctcggacggcgcctggaatcataatagtcgggattgagatacgggttgacctcgtcggggtgcagcctggtgaactcatgcgcgcatactgccttgagcgcggcctccgcccgtgtgatggcggaaaacaacagttcacgcaactcacggtcgaacaggaacagggcgtacagatcatcgaaacgcgcgcccgtcccgtaccggtcatcaccagcggtcaggcatgcctttcagtcgaggaacaaatccttgtagccattgacgatcggataatagccctcgcgcctgagcacatgacccgcaccggcatcgacagccatgccacgggagcgcaaaatgcgcagctgttcgtccacactcctgtagggcttgcgcaacgacatgaattcgacctcccccaatccggcgatgaaagcactgaggccaccccgcatccacgggatggcctcagcgaaccgaacgaagtccagcttatttcgctgttacagaatagcgccgatcccccgcgaatgcaacccagccggacgtcgagtgagatgaaacctccatatcattattccaaaggcacacgccgatctatcaaggccaccaccagaaaaacccaaacgcctccaaaaagagacgacgcacgcctccacgagactgaattgcgccccgtttgttggacgttgttaattaggatacagccctagcccgcgagggacatgctccggaactcctccggggtgtgtccctcgagtcgtatctgacgccgtctggtgttccaatggatgatgtaggcgtccagttcgcgcttgaaccgctcgtacgagtcgaactcccggcctcggtagaactcgtccttcaagtggccgaacacctgctcggtagcggcgttgtccaggcagttgcccttgcggctcatggactggcggatgccgaggcgttcgagctcgtccctccaccatcggtgctggtactgccatcccatgtccgagtgcaggattggctccgcgccggcgagcaggcgcctctgctgcccgaggtccggactgcggctcacgtcccaggccacgatctccttgctggccatgtcgtacacgggagcgaggtacgccttgccgcccgcgaccttgaactcggtgacgtcggtcccgagcttggagaacggacgggccgagtcgaagtcgcgttcgagcaggttatgcacgtgatcgcccgtctcgcccctgtacgagctgtacctcctccacgggttcctggagcggatggcgcatctcagtcccatgcgccgcatgaccccaggcacgctcttggccgacaccttccgtccgaactcgtggaccaggcacatgcgtatctgtcggtggccgcatccgttcggcgtgcgtccccagatctcgccgaccaatggctcgagatcggcccgcgtcacacgctccggatgcgacaggtgatggtagtacgtggatctggccagtcccgctatcctcaggaggtggtcgagccggtgtccccgccctgcgagcagtcggacgacggcgcttcgctcgcgccgcgtgacttggacgcccgcagggcccggagtttttccaggtacgcgaccttcgccttcagataggcgacctgttcggcgagctcctgctcgcgcgtcggttcgggtctcggtttggattccgagcctctgggcctgcccttgggcctcggcccgagcgcctccggacctccggcccggtattcgcggcaccagcgttccaacggcgcgacgctcgcgatcccgtgcatggccatgacctccgccttggtcagaccgttctcgacgtggtcgcgcgccgcggcgaccttcgtctcccccacgtataccgtatagtcaggaacgcttttatacctgttcttatcttccgtatgaaccacatacaccgttggataatgaagacgcgttctctcggacatcgatacccccttttatccctatctcgcttatgtatggcagatacacctcggaaaagcgtacttagggggtatgagaacagctgtcatgacaacctgacctgccatatataagcgagatgtctcaggataaagcacggaatctaccatacgtaagcgggataaccaagcttaagcgctcgtacgacacatttttgtgcacaagacatccctccgcaagcgtcatccgaccgcctggtggcacgtttcatatgcacagagaaaacacagcccgcaaacaccacactcgaagcatgacgccagtggctttaaggtagaaccacgccgattctgcttgctgattaaggtaggcgatacgggctttctctggcattcgttgtcgacggaagcccatttggcggatcgcatgttcctccttttcgggtatgaagggagtgttcgggcactggagtgagcataacgtaatcatgagagagcagacaaaataactacggcagcttcgatcttgcgcgttccgcccctctcggtcttccctcggcgcatctctacgaagtgcttgacggtaatttcttccaaggtgaaatcagctagtggggcaagtgtttctgtatctgtgcattcttggaccatccgtgttcatgatcagtctcgggtcgaatctggtcttctccgacgccaaccctcgcaagattgtaaaacgaggctgcaccacgctcatcgcttttcttctgttgaatatcgtgcgcgatgggattcccgatgtagtcgttgcattgactggccaccccagtactctcgacacgtttggatacgatatttttgcgtccgatattctgggatttgcgggtttcgtattcctgtttttcgcacttgtcaaacattttcacattgtttcattggctacgccgctgatttcgttatgcatgttgacggttaacgatctgattccgccattgcacaatgtccattggactttacgtgcagaagcggcttgtcgcacgcgcttctaaagcctgatttcgcatgcgcacatccgcaaagtcacgcaaatactagttagcgcaacactacttggtgagatttgttcccgatgtttttcgtatagcaccctaggtcaaccctttttggtattttttcattggatatgccatacgatgggatatcttttcggagtatacgagattagggaaaatatggtcaaccaccataaaatgattaatgctgcaatcgcaacgcttgcgacttgcgccatgttgctgccggtagtaggcagcgccaatgctaatgaatcctcgaataccaccgtacttggtgccggctatacggccaccaagatttcgcaccccaatgcagggctgggcgaagacgacggtatcgtaaacgttttgaacggtgaatccattgatgatctcacgcagggtttgcccgagcgtggtcagaactattcatgggcttcggccggctacggcgactggatgtatgtgggcacctgctattccgcaatgggttccacgctgaaatacatggctaacaccatgggcaccaagtatgccagcatcaaggccgctttggatgttgcgttcaacggcgagctgttcctcgacaatggcgagaaccacagcttgctgctcaagatcaacgtcaagaccggtgaagtgaagatcatcgtcaatgcgattggcggagagcatgcggtcaacggctatcgtgcagccgttgaattccatgacaagctgtactttgctgccgccgcaaagggtcagccgtacctgctggaagttgatccgaacagtggtgatgccactgaaatcgtgtatcgttccgctgccatgaccactggtctgaagaagggctacactgctggtatccgtggtttgaccgtggtcaacaatcagcttatcgccagcatgatcaccgataacggtgccactattgtggcttcttccaacccgtcagcaggccaggattctttcgccactatcgctacccagaccgagggcctgtacaactatccggcatgcgctgtaactgatggagtgttcggtggatgcgtgtgggatatggtcggcttcaagggcaatctctatgtcactatggtgactggaaccgcgaagaacaacaagcaatccttcgcactcgtgcgcggcacgcaagataaggaaaccggcaagtggaccttcaagccgctggtcggcgatccggcagacggcgccaagtacgagtggggtttcggagcgagtcgttccggcgcagccaacatggtggtatacaagggccacctgtacatcggcggctacaacgatccgatgaacgctttggagaaggccatgcagatggatttctccgacctgtacaaggatctggagagcccggtcaacctgtggcgtatggatgttgacgaagacggcaacgaaaacttcgaaatgctcgccggcgaagccaacaacaagtacttcggcgattccaaaggcaccatcgatggcaataccatgctgtccggcttgggcgacagcgacgagcagagccgtcacctgaaccagtatgtgtggcgtatgcagtcctacaacggcaagctgtacgtcggcaccttcgacatcagtgatcttgcatacccggcaacccagttcgccaacggcgacattctgaagcgtactccggaagagtggaagaagcagatcgaatacatcaagatcttcttcgactctctgaagaagaatgaccagaacggcacttccggtactatcgacacggactctcaggaagcctccaagccttccgagtccgaatctcaggaaaccaccaagccgagcgatgatgacatcatgccgttgaacgaaggcgaagcatctgagagcgatcaagctgcacaggcagttgaagaagccggcaagaccgacgaagtggccgctgacgtggctaccatgcagcagctgctggaggacatgggcgctgatctcaactccaagcagaccgacgtggtctcccctgacggtgtcgctccgcaggccgctgaaacctacacgctcgacgatcgttaccagttcctcgcatccctgcagcggctgctcgacctgtacaacaagaacaagcagtatctgccggaattcattaccaacgagctcgacaagtggcttaccgaagagaatctggagaacttcatcgacttcgtgggcgtgctcagctacctgcattactccaacgatgagactcgtggctttgacctgatcgtctcttccgatggcacgaacttccagaccatcagccgtaacggtttcggagataacaacaaccacggtctacgcgtgttcgccgtcaccgattccggtctggcaattggcaccgcaaacccgtaccatggcactcaggtgtggctgctgaatgatggtgaaatcaagaatgctgagctgacgaatggcgatgcattcgactacgacaagtatgatagcgataagaagagcgccaacgccaacggtctgaccgttggcatcaaccccaatggcaataccgtggaagacgtgcagtacgactaccagtcactgaccgccggcacggattacaccgtggccgatgacggttccatcgtgttgagcagcgcattcctcaatggtcgcgaaaccggcagcaccggttctgtggtggtgttctacaaccagggtgcacgcgtgcgtttcactgtgactatcaaggacagcactccgaacgcaccgaagaaggatgatgacaagcagaatacgaagcctgccgcacacaagaaggcaaacactgccaacaccggttccaacgtaatcggcgttgttgtggtggtcgctgttctggttgtcgcagcaggggcattgttcgtgttcaagcgcaagcgttcctgaattgccagagcctgttcttaggactcattcctaagttcgtccgcatataacaatcccgtatgattcggttcgccggaatcatgcgggattttttattttgcaggaatcgcccatctcacgtcatgtcaaactgccatcacaagctgatttcaatgtgcgatatgcaaccatgtggaagttccgatacgggacccattgaaaatggcacgcaatcctacaaataacagattcaccgcaagccacagcaatgccatacgcagcgcggaagacgcctgcatcgcatcgcatatccaaccaatcgcagcaagacagggtacatatattgcagccgtcgccgtacacgtcaatgcaagataacggtaatcccctgccccaatcagaatgccatcaacagcccacatccaaccagccaacggcaatgtcacgccaacaaccaccataccgacagtgagcaaatgctggatctcaatcgactgagaaaacagcggggacgcacaccatccggcaatcatcaaaccaataccgattaccgttcctccgcataatcctgccctgccagcgattctcgtcaaacgcatggcttcatcctcttgacgggcaccaatctgcgcggcaaccaacgtctgaccggcaataccaatggcatcaagcatgttcaacacgaaattccaactggaattcaccacctgatacgcagccaacacttccacgcccatatgcgtagccagcaccacattcgccaccaggcatgcacgcaacgcaagcgtgcgcaagaacaacaccgcaccatcgccagcactgttcaacactcctgacaaacgcggccgtaaacgggcaccttccgcacgagtccacaacatcgcaggaacaataagcaacactgccatgaaccattgcgaaatcagcgtggccactccagacccaaacacaccccaaccgaatccgagaataaacagcagatccagcaacgtattgagtatcgcacccagcgtagcagctaccaacgtgatgcgaaccttctgcagtccgcggaaaataccgttggccgcatacaccagcaacatgccgggaataccgaacaccacggcacgcacgtagtcaaccgcgttatgcagcacactcccttgggctcccatggccatgcacaacgggcgtgcaataacgaacagcgccacagacaccaccacgccaatgattccagccagccacagaccatcaacgcctgcttccaagccttctcttcgtttgccagcgcccaaaagacgccccacctgcgatgtggtgctatacgcaaggaacacacatagccccactacagtgagcacaatggttgacccgaccgacagaccggcgagcgcctgcccgccaatatgtccgacgatggcggtgtcgatgagcacgaatgctggttcggcgataagttgcccgaacgttggtatggccagtgtgagaatggtgctgatggtggtgcatgatgcgttgtttgcggtatctgtttcgtgagtattctgcgaagttgatgtggtcataatcgtaagcgtctggcgtgttggggactacatgtgcagtgtaaggtcacgtgtttcaccattgccgttgattgctcagattatgactatgcctgttttgcgctgttgagaatgccgttgaaggttttcgctgattgtctgcataaaggtagaggggcatataattcccgaaccgctcgtgacgcatagtccaagctcctgcgagacccattcggccctatccaaaccctagtggattcccgaatccgccttcgcagtaatacttcatgtgaccgtcgaacttagccccgaactcgtcaatgggctaccgcctggtctcaagcccatgagacactaggaaccatgactacagttatcatgcgcaccaccgaaggtgacatgcgcatgatgcttcttctctgggatgcgacactaggaaacagatcactgaagattgttgaaatcccagtcaaaaccgctccaagagccctgaacaatcccgattttcccgaaaaatagaatccccacggccgaaggatagcaccttattcaaaatcaccggcgtaggcaattactctttcttctaatggtttttcaagaagtagagaaagacaaaacaaccgatggccaatggagacaggaaaagacgaaaatggggatgcgtcgtcgcctgcaaagacgcggacggaaggatcgtctcctggcaggcccgataccagagtcccgtcaatcccaggcaaagaatctaccgccgattcggattggaattccagaccgaggcgtaccgctggctcgacgaggagcacgcgctcgtcatcgaccataaaaaggggatccgcaggtggacgcatccgtcggcgaggacgatgcacggcagggtcctgttctcctcatacgcgacgcgtttcgtcgccgacctgcggaagaaggacgggtcggagctgagcggcagaagcaagcggatccagaaggcggcgttggacaaactgctcccctggttcggcgagacgcccatgtgcgacatcaccgaggaattcgtcaacgaatggtacgcgaaggcatgcgacgaggtacgtccctccgcgctcgagcacgcggtctggctgctcaagcgcgtgatgagggccgcgaccgagcggcagccggacgggggtccgccgctattgtcctcgaatccatgcaatctcgtcacgaggaagagaccgtccaaaagacgcgagcaggcgccgatgaccaggcaggagatcgacacgctggtcgagggcttcccggaatactaccgtctgtcgatccatctcgcgctgctggtgggcgggctgcgcatcggagaggtctgcggactgcaactcagggacatcgacctcgaccacaggctgctgtatgtgcggcattccgtgacgcagggtccggacgatctgggcgaataccggctcgacgagacgaagaccccggaaagccaccgagtcgtgcccatccccgccccggtctgccgtctcatcagggaacatatcgacaggttctgtcccgacagggatcccgacacgatgctcttccacgcggtcaggcacccggaacgggtcctgaacccgacgacgatccaacggcagttccgcaccgcgaggaaaagaatcaaccgcgaggacgtgacgttccactccctgcgcgcgacgcacgcgacgatgttcatgatccagggcggcacgctgcgcgagaccatggacgagctcggccatgtggatgtcgacgtggccgtccgatgctaccaacgcgtggtgccgaggcacaggcgcgacgtcgccgaacgactggcgctcgaatatctccccgccggggatccggccggcatcaaggcgcagatagcccagaaggaagaggaaatcgaccagctgcggcagaccgtcgccggactccggagaagactggaagagctcgaagacgacggagacgggcggagccagtccggataagcatacccaaaaccgaaaaaccgaaaaaccgaaataatgaaaaaccaaaaccggtggagaccggcatcaaacggaacaggcccacgcatctaagcgttgcggcatctgccgtcgcaacacttagatacgtgaggcgttatccgaaaatcatctcgacctatgcctgagtttcggcttttcctgccctggaggaacgatggcacgctgataggagtaatgctcgcacacatgttgtctctgtgcgggagacatgtcgtatgccttgttcgccggttgcgcatactcaccaagatgggccagatcattcgacatggtcaacggttctgacaacggcttgacgattctcctgaacatatcctcaaggggacgcaggtcgtttcgttgcatccccgcgatcgaggcttgatcgttcgtccttttgtcgatgagtccccaatcaaaatgccagccggcctcgcgcgcgatgatctcccagaaaatgcgttgcgtccgcccgttgccctcacggaacgggtgaaggatgttgaagttgttgtagctgacgctcagacgcttcacgaattcttcatgaccgaggcctttgaaaagatcgtcaccgcgaagcaccccctcggagtagcgaacccctatgctaaacagctccaacggttggaagggaagcccctcgcccttgcccatgtcgatggttcgtatctcccccgcccagtcgtacacgtcctggaagaggaaccggtgtatacggcgaagctgttccagcgtcccctccgcaggtgggagattctctctcagaatggcggcgcgggcggagcagagatcgttctccgcagccgccagcgcatccttgtccgtggcgcccacaaggttccgcagcacgttcgttcctggaatcaggtagggatcgaagacacgcgccatcgtcactccaatccgtaacggcgacgggtgcgggaaagaagctcggcgctgccgatgctcccccgcgcatattctccggcatcgcgtatgaaggccctcgtcacgtcaccgccttccagccgcacggactgcaccgacagtccgacgttctccgtgcggcggcgcatctcggattcagatatcgttccgaacattgcacctccttttctctttagattctagcaaaaccgacggcccttagacggagccgcgcctgattccgctcctaaagtccttcattccagtcgcaatcctttcgccagatgccacgcatgacacgtcaggcacgccaccgcaccgtcatcgcccagaaggagcgtcagatcggcaagctccgggacgaggtggaaaggctcaggaagatcctgctggaacgggataccggaaccggtgaaaaccgggaaaccgttttacctaaaaaccgaaataccgaaagaactacataccgaaaaaccgggatatggaaacactggaaaaccgagacaaggagaaaccgatgaacgagaagaccctcgaaccgatggtgatcgcgctttgagactgcttatatcgttttggacggaatgagcgtcaatcagaaagttatgtatgatggtttcgcttatttatctcggtaaggagaatcccatctcatacaagacagtattcggcatggacgctttcgatagacatgacaccgatggaggaaaccaaaccgcggattcagccagcgatataaaggtgtatcctgagtccgcttcgggatgtttgattaacgacttgggcaagttgctgaatatgaatccggatttctatagacgacggatccgccgcattagaccggctgcgattgccgtcgggctgagcgccatttgcctgattgccattttcttgattccaagtgaatcgaatccggttttccagaatttcttcagcgcactgtttggtttcttcctcgggttggcctcctcggcatatgagaagttccgcaaatgggccgaacgagtcaatcagaccatgaaagacgctgaaggaagtatgccgatatgggaagccatatataagaattccatattctacgatgaatgcttcataacgcttccggcggcacgcgtatccccaacctgggcacaaagagcatggattaaaatcaggttcccctcattgtcgcgcaagtggcataagtattttcgcaacggaatggctgaacctggtttgcagccattatccaatgagaggaaacgcagaaagcggcttcattacctggagtcgctaagccgatgcgtcttcatgctcgaaccgtatcaggcgactcttgattatctactggactattcggataagatcctcggggagaaaattcgtcaggataaaatcctaaagggatatcttcagcctgtcgaaggaatctacatttaccaaaaaaatgtaggtaaatgacgcatgccaagataccggaatacggaaataccgaaaaaacgagataacggaatcggtttcagcccccggaatccatcaccgtacgccccttaccgaagagatggtcgaacagcttctggcgaggggcagaactgtcaacagcagcaagcaccagaccatgcttgccatcgctgccattaaaaatgacgacacggacgacatcgtacagaagaaaatacagatgaccgcaaagttcgtggacgacttcgcgacggttgccaggacataggcgaacgggcagtcccagcccctcgctcaacgcctccaccgtgatgatgaaccgtatcggacattcctcggacatgagatccacgtctttgagctcgtccacgttgccggtgttgtatggaggatcgatgtagatgcaatccactttgccttcgtattcgggcagcagggccttgagtgcttcgagattgtccccatggatgaccatgttgccgcaatcggatccatgcgaatccaaaacgctcttttcagggatgcgttcgagtacacggtacggcacttgagggtggtatgcgaccaccttgttcttccccatccactccaagtcggtgctttcggcctaatggctcatatggcacccaggaccctcgtgatcaattccggcactcttgccatccccgtcttgccgggcaaggttctgccgcagcgtgtcgccgaacctgtccaacagatccgttttgctgcgaatggcgtccggcttccgacgcaatccctcgaccagttcgatgaacgcgtgttcctcctgttccacgcagtcgaggaacacgaaacagaacgccacgggatcgccgtccacctgccaggtctccagactgcgggcatagtcgcgcttggcgtcatacttgatcgccacgggacgatagccgtgcttcagcagcatgaaattgagcagctggcggccggtccgcccgttgccgtccatgaacggatgaatattctcgaacatcgcatggaagccggcggccctgagcagcggatgagcgccgctcgcgtccagcccgtcgatcagggcccgcaggtcgtcgcggatctccaacggatcggcggtcttgacgcgggtcgcggtgatcctcgccagataaccgtaggggcggaacgtgccacgggcgaacggctgcaggtccagcgcagtcacctcatggacgcgccggaccagttcctcatccagtctcctcccctcccgggcgtattcgcgcacgtaggccatgccatccgcgacaccgcgcgccgcgaacacgtaccgcgccggcgaatccgacgggacgaactcgccctccaaaaccagggacgtgtcctccaaggtcagcgtggatccctcgatggcgttcgaattgtaggtgtagcgcaccagccagtcgcggtcgtaatccgccagcgccatgccctcgacgccgtccagggggtccagtgcgcgggcacggtccttcagcgcgtcgattcgtcgcaggcgttcgacgattcccagctcgcgttcaaggccgagcagttcctcgggcagttcctgtatgcgctgcgatagctcgggattggccatcatgtccctcttttcgtgttccggttgcaaagtccattattccagccgcggttcgttccgtcctgcggcctgcatgtcatagggaggcgcgccggccgtcccgggtcgattcgaacgccgcggccacctcttccgataccggcatgcgcatcgtcacccggccggtttcctgcgcggcggcacgtttcatggctcggcgttcggccctggtgggccgttcgagaatccactcggcgaacgcgcggataaggatggacgcgacgatcacgccgatggatccccagaagcacgggacaaagtccggcttggagtggtcgtaccagaaccagacaatcaaagcgaggatcaacgccaggccggcggccagggcggcgagcttgtggaacacgagggcgagcgtgcggatgggatgcgtgaccagccccaccgccaacgcgacgacgacgagcagtgagacgaagcccgcggcgatgatggcgacgcccaggtatatcgcgagcatatagagtccgaacatgatcggccttccttctctcttctattccgtttcttcggacagataggtgtagtcgacggcgacgccctccgcctcaagcagcacggcggcctcgcgcacggcggcggcgcggcgcttcacggattcctcggcccggacccagtcgggcagcccctcgggcaggtcggagacgcgggagaacgagagcacggcccgctcatctcccctgtgccgttccacgatggccgcgacggcgcgcctgtgctcggcgagatagtgttcgagcatctcccgcatcctttccgagggttggatccggtatttctccgactcgtatttcttgaccatgtccacggtgaggttcgcgagcacggccgcgtcgtgctgggtcatgccgatgcgttcgcgcgtcgcgcgcatccacgccttggtctcgctccaatcctcttccgtcatggtccctcctggatataagaaacccggatccgcctgcgcgaaccgtgattatacttttagtataatcacggttttcgacagggcggacccggcgtttcccgggtcacggccgcggccgtgacccgtttcgtcactcggactgtgccggcgagttgccgtcggcgtcggctttgcgctgctggtcgagcatctgctgctggatcaggacgcgctgcgcgctcatcgtgttcgttcgggcttttgtacatcacgcgcatgttgctcgcggagacgctggtcttgagccagaagagcaccacggacgggctgaaccggtcgccggtgacgtcggttctcccccgtcgcgtaggtgaattcggtcatggtctgctgtgattcggtcattttcttttcctttccttgttgtcgttgaagtcaaatgcgatgcccttgtccttgtcgatgaggagcgcggcgtcgaacctgctgcccttccttgagatgaagccctcgaggctgaccttccggccgacgagcaggccgcgcatggtcgtgtcggtgatggtcttgccggccacggtcgtccaggcgctccagccgcatccctccgtggtcttccatgtgccgtcgggttgtttctcgcgccggttggtggagcattggaacaccttgcccgttttgacgacgggcttgccgcatcgtgggcatgggccgaacgattccgtgttccgtttcctcgtctgcacatggtcctgccggacggcggcctgggcatcggccgggatgccggcggcgaggtcgcggaactccgtttcgacctccgcggcgtccgtctgtccgtgttcgacctccgaaaggcgtcgctccatgccggcggtcaatgccacgtccttgagcttcggggcgaccacgtcgatcagggatcggccctgttcggtggagcggagctgcttgcccttgcgttccacgtatcctgtgcggatcagcttctcgatcacgtcggcgcgggtggccggcgtgccgatgcctccggaatgggattcgtcgtcgtccaatgcggccttgagttccttgtcctccacccagcagctagcgtgctccatcgcggcgagcagcgtcgcctcggtgaatggcttcggcggcttcgtttttccctcggacagtgtcgccccgccttgcgggaccggcgcgatggagaccccgtcggtgaggttcgcggggatgatgttgtcagcggcctcgtcctcctcgccatggtcctcctgcgggacggcatgctcgatggcgtgccagccgagggagacgggctggtcggaacggctggtgaaacggcattcgccctcgggcagaagtcgaccttcgtccggatgcttctcgcaccaatgcgggtcgatgttcgcgacgacgttcgtcacgtcgtgcacgtagtcgtcgcccacggcctcccacatgcgtcgcaccacgcgcgtcagcacgagacgttcgtcgtcgccgagctcatcgagcgccgccttgtcggcctgcatggtgggaaggatagcggtgtggccggccaccttcgcgtcgttcacggtcagttcgagatgtggccgttcaggtttcgcggacggttcgatgaagccggcggcgagccggtcgccttcggtgaggccacgcagcgtgtccaggtcgtcgtgcgtgatgtactgcgagtcggtgcgcggatacgtcgccagttttttctcatacagggattgcaaggcggccaaggtgcgggcggcggtcaggccgtgcagccggctcatgtccttctgcaatccggtcaggtcgtacaggcggggcggcgcgtcgtgctgctgcttgcggtcggccttgaagatcgagaaggcgaagtcgtccgagttgacgatccgcagcagcgtctcggcgtcctcccgcctgtccagtcgttcgccggccagcttccatccgcccatcggggcgacgaccttccagtacggtcgggccacgtagccggtaatgtccctgtcgcggtccacgatcatggtgagcgtgggcgtctgcacgcggccgacggtgaaccgcgcgttgtagacgagcgaataggcgcgtgaagcgttcatgccgatcagccagtcggccttcgcgcggatcatcgccgaatcggcgagcccctggtattccgtctcgtccttcatggacgcgagggcgtcgcggatggcgtcctcctccaggctcgcgacccacaggcgtcgcatcggcttggagactcctacatgcgtcacgatccgacggaagatggcctcgccctcacggtcggggtcgcatgcgtcgacaagcatgtcgacgtcgccgcggcgcatcagtcctgcgacgaccttgtactggcggtctgcgcccttgtcccggctgaccttccattgccagtcgggtgtcgggtcgatgggcagcgtgtcgaggctccactttccccagtcgtggttcttgtattcgtcgggcgcggccaggtcgacgaggtgtccttgcgcccaggtgaccaggtcgtcgccgacctgcacatagccgtcgtgcttttccatgtgcccgccgaccgcctgggcgatggcctggccgaccgagtgcttctcggcgatgatcagtcgcatctcgcatcacgtccgatcatcagtagttgccggacgcccatgcgggccgtccgtcgtccgaggtgtcgggttcggcggcgtccttcggggcgggctcgtcgtccgcctcctggacgtcggatccggtcgtctccggatccgattcggcgacggtttccggttcgggttcggcaggcggggttttccttccgcccggtgcggcgacgagctcgcccttcgcgtcgaacgcgatgttcttctcagttccggtcatcgccagcttgtccgcgatcatcgtccggctcatgccggggaacgcctcctcgaattgcctcgccgcgtcgcgcagcgcctgtgcgcttttgcggaagttgtcaagacggctgtcgaacttcttcgccgccgtctccttgcgtttgaacgactcgcgttcgtcgcgcaggaagtcgtccacgtaatcggatgccatggtccgtttcctttccagtcttgttttcatcggttcccggtttcgagccggctggaaccatggtcgcgcgattggacacgcgccggtttggacagtcggactccgtcaggatcacacgcttgtgatcctggcttcgccggaaacggagcgcggccctgggccgcgcgctatcttcgccgacccttccgggatttccaggcgtcgacgcctggaagggaacagtcggccggccatggttcatcatcacagccccgcgcccgcgtcttcggaactgcgtgttccatgctccgctccgggagggcttcgcccgattatcccgaagcgggcacggcccacgcgtcctccaccgcgcggcgggaccgcgaggctgccccatatccggcgaaaggaaaacaggaacgccggcgggacactaaggagtggaaccatgcagatggaaccgatggaattgcagcacaccgtcttcgagaccgacgggggacgaatcgacgcgatgtggagcgacgtgcgtctccacgcgggcgacatcatcacgcccgacgacctcgacccgctgctcgaaaggaacgggtggatgctcgtcatcagggactggtggttcaccgacgagccgttcgggcgcgcggaatgaaaggagacatggacatgaaggagaagaacagggccgaggaatggttccgggccaaacacgacgagctcgccgaaacggcgcgtgccaacctcgccgcacacgacttggaacccggacaggaggcctaccatctggacagcctccattatgcgaccgccgaacagatggaggccatatgcccgacgggcatcgacttcgaccggtacgcgactctggcgaacggcagcgtcggatacgacgaggccgacgcgcattgggccgacgcgggatggtgggacgaacaggcgcgagccatgtgggacgaggtcgacgacatccctgacgacggcctctactggacaagcgtcgaagactaaaacgtcatcgccgttcccggccaagtgacgccccgggaccgatgccgcccgcatgacgcgggcggcgcctccggcggccagaggacgactaccgtcctctggactccacgcgccgggaaccgttcccggacccgacagggcgtcgccgtggcacggaggccacgtctcgccgacgggaaacggagcacggcaccaatgccgcgcgcatcccgaggattttcttttgaccggccggctgacgccttgatcacagcggcacgcggaacccgtcaacgcccgcgcagcgaaacccgtggtttcgacgcgttctcatgacggaacccgctaccaccgctagcgctttcacttgaccatccggtcaaaagaaaaatatcctagaatggaagacaacgaaaacaaggaggcggacatgccggtcatcagcatgttcttcggaatcatcatcaccatgaacgcggacgaccatgttccgccgcacatccacgccagataccaaggacatgaagcgtccttcaccttcgatggcaatctgctcaagggagacctcccgcgcaagcagcgcaaactggtcgaggcatgggtgctgctgcatgccgaagagctggaagccgactgggagctagccttcaacctcgagcacccattcagaatcgacccgctacgctgacaaggaggcaacggacatgaccatcgactattcaatcaaagtgacccaatgcgagcccatgcccggctacaagctcaaggtcacctgctccgacggcgcgaccggaatcttcgacatgtcccgatacgtcgaccgcggcatgttcaaaccgctcaaggacccgcagacgttcgaccgcgtgcgactcgcgttcggcgtgccctcatggcccggagacatcgacatcgccgcggaacgcgtccgctccgacatgcaaatcatctaggaacccgcacacccctgccccgaccgtcatcaagacggccggggctttttcatgcccgtatgcatgacggacatgacgcgccaccaacgacccaccggccccgcgattttttcgcggggccttttcatttcccgcgctccgagtgtccaaacccgccgctgtttccacgacggacgattggtgtaagacaccggccattccctcaaggccatgggcgaaaggagcaaggagtgaacgcgattatccttcacggcattccgcaatcatgccgtgcgaaatcgctcccaatcaatgaaattgatatgggagtagcaagcgacgtgattgtagctacaatcactcgattcgcgatgcgaatcggcttgccgggaagacccatgccccatagtcggcggagcctccagaccgctcgcgcggcatcacagaaaacccaactccgcacctccaagagaggtgcggaatgagctgggcagcaggcagagatcggaacatctgcaagcgaatcacgttcactcaggacgagtgggagcaggtgcggaatctgtatgaggagctgaccaggtacgcgccggagcaccggtcgttcagctcctacgcgcgcaggatgctgtccgaacgacgcatccacgtcaccgagatcagaccgttgacggaccccgagccgatcgcgcgcgagatcgaccgcatcggcgtaaacgtcaaccagatagcccactgggccaatgcgaacgagcacatcacgcccacccaggtggaggagatccgcgcgtcgttcgaccgcatcgagcagctgctcggcgacctgttcgccgacaggcgcgaagcccggaaggacgcgtgagcatggcggtggtcaagctcggcaggcccgtgaaatcgaatctcggcggcgacaacggggcgatggcgtacatcatcaagcccgccaagaccgacggcggaagactggtcagctcgaactacgagcggaccaggacggaccacgacgcactggccgaaggcatgctcgacgacaaccgcaggtcgccgcaaggcatccggaagaacagccggctggcctaccacatcaagctcagcttcagtcccaaggaccccgtgacgccagagcaggtgcacgagctcggcgtggagttcgcgcgccggatcaccggcggcgaatacaagttcgtggtcgccacgcacaccgaccggcaccacctgcacgaccacatcatggtgtgcgccgcatcccggtacgggcagcatctgaaggccgagctgcccaaggacatcatcgaccagtggcgcgcggtcagcgacgagatatgccgccgcgaggggctgagcgtcgtgttcaaccccgtcgtggaggaacagacgcgcaagatgcgggacggtacgacagccgaaggcgacgacggaacgtcgccggcgcgcgatcccaaatacgtcgatgaagcatccgtgcggagcgcgaacgaaccggagtcgacggcgcggaaggcctcgggcggggagccgttggagcgccggtacggcatgtcgatggaggagatctacgcggccgcgaagggcatggggaccaaggaccggatccgcatgctgatcgacttgacctcgtccacggcggagaacttcgaggactggagggacatgctcgacatccgaggcgtcggcgtcgaggtccgcggccggcacctcacatatacgctcaaggacaccggcttcaaggtccgcgacgagaaactcggccaggcgtacgacatgacgaacatcatggccggattgcaaagcacgcccgtcatccccatcacgttcaaccgccggctcgtcgccaaacagaccaggaagacggtcaccgtgtggctgccaggcacccaccgaaggaagaagatcacgttcgacgcgaagcgtctcgtggacgacggcggctccacgctgcgcgcgttccttccccgcgaccgcgaccagatcatcctcgacccgtccaaccggtacgccggcaagaccccgacgaccggcctctaccagtggttcggcgagcccacgagccggctcgaaccgcagaccacgcccgaacggctgcccctcagatacggggtcagcccggcccagcagcggtactaccaggcgcaggcgcgccgcctcgaccgcctcgccggcgaggcgaaggcgttgaacgcggcgatccgatggacccgcctcgcgggcggcgacagcgccaagggactcaggctgctgcgcgggaaggtccgcgaatcgcacgacgagctccaggccgccgtcatcgctttgcacgacgcgatccaacgcggcgaccccgacctcgtggccgagacgcgcggcgagatggaatgccgcgaggccctgtgcgaccggtacgaggacgagctgtccgccatcgaacgggagatccacacgacccgcgaccgcgagcagacggagaccgagcagcgcgaacagcagcacaagcgtggacggtccatctgaaccgtcccaggaaacaccaaccgacaacagaaagggaaccgcaatgccaatcgaggaacaggctgaggagaagatccagaacgccgtccagaccatcatcaccggaggcgcgaagctcatgctcagaatccccaagggcgtggccatggcgatgctccgctccggtatgaagctcgcaaagaccggcgtgcacgccgcgggcgcggccgtgaaggacgggatcgacagcggcgagatgtccgagaaacgattgcagaggaagaaggacggcgacctgcacgagctgcaactcgacgactcgaccatgcgcgaggtgcagcgcagcctcaagaccgccggcatcgactatcacctcgaacgcactgaccggggccagttcatcctgcacttcgccggcagggacgaggatcacgtccgccacgccgtgcaacgcgctttcaaggacatgggactggacgtcgccgacgaagacttcgccgtcgagcagacggaacagcaggaacggacgacggaacggacccgcaacgaaccggaaaccccggcacgggagacgcccgtcgaaccggccgcgaagcccatgccgccccagcgcatcgcatgggacttcgtggatccggaggtcatggagatggccgcgaacagcctcgccgcccggcatcccgaactctcgtgggacaagctcatgggcgacacgacatggaacgagcagaccggccgcgatttcgcggaccggatcatcggcaaggccgccgccccgagcctgcgcgacgagctcgacgccatcctgcgtgacgactacgggcagggcgcgcaaacccaggagcagaaccgtgcgcagacgcccgagccaagccgggagacgccggcaacggagccggaaaaccaaccggaacccacgccggccgaggcccgggcgcaggccgagcaacagcagacacaggacagagcagacaatcccatgccggccggcaaggagcaaaaaccgaagccgatccggtcgaagaaggcactgctcgaacggttcaagacccgactcaacgagaacctcgccgaacagaagaaccacatgccacccacccagaacagggaccgcacgccccgcaagggccgttgaaaggaagccacaatgaaccagcaggaacaggcgacgaaaagcgccgcgatcttccaggacaccatcaacgggaccaacgatccgacaccatggccggtgaccatgtgggcctcgtccggcgacacgatatggacggctggcacggcaaggacggccggcgaggactcggtgggcatgatctacggtcctggcgacaccatcgttcaccggaacacgatcgccggcgacaccacccgcgccaccgaatccttcgccatccgaccggcggacgggcagagcccgatggacgcgatgctcgcgggcatcgaacagtggaaccaccgtcatcccgaccggtgggacaccgtggccgagccgggccggtaccgcatgacggatccgacgacgggccggccgctcccgatgggatggagcgacagtctcgccgtggccgcgtccgcggcgggccgcctcgaccccgacctgctccaagccagcctcatgcagaacgcggtcgagcacgagccgcgcccctgcgtgttcttcctggaggacaacggatacgacctcatggtcttctcctggcaccgaaaccagcagggactgttcgacgcgatgaccttcaagcacctgcaatacgacgacctgagcatgcagatcacgaccatcagccacagcgaagacatgagggaatccttcccagcgaaaagcatgagcgacggcgaactgctcacccaaagccgcgtctaccgggacgaataccagcactggcgcgaacaggacggcggatccgtcgcccagggcatgaccggccgcgtcatgcgcagcggactgctcaaaccgggactggagcagaagccgctgctgaacctgaacgacggacggcgcgccccggactgggacgagttcaccgaccaggccgccatctcgatcctccagggccgccccgtctcaccgacgccagcgctcccccagcaggaacagccagcgcagtccgccgaccccgccaccgagacgcagacaccggcctggacggccgcgatggcgaagcaggtctggccgaacgcgtgggtggcgaacaggctcgcgcatacctatatattgcgcgcgaaggacggccgcgactggccgaagatgatcgtcggcctcccccgcggcaccgtcatcgacggacaggacctgaccggctgggccaccgacatgttcatgagcggaaagaaccagaggcagaagaacgaggggcgggcagtcaacctcagattcaaaccagacaccccggtcgaactgttcaccggccgcggcacggaacgccgcaccatgcaggtcgacccgcagacgctcgtccagacgatcatcgacgcgcagaaacgcaaccgcgacgccgaggagacgctcgacacggcatcggtggaactcgccgacaagaccgtggaggaatcctggccgcaaatcagccgcatgcagggccggttcacggaataccagcgcgctggcacgtacaagccggccgtcgcaatgaaatgggcgcgccgactcgtcgaccggaccgccgaaacggacgaaggacggtggaccagccgccaacgccgccaggccgccggactgctcatccaggaactcgccgccgcgcaggagacactggccgaaccattcgcccacgaggacgaataccggcaaaaacaggccgaactcgaacgactgacgtccaaacccgacgagacccgcgagacggaaggtagagaccagaaaaccacgcaaaaggaaaggagcgagaacatgccattgacccaggaaaacgtcagacgactgctcgaacaggaccccgacatcaccggcatcacccaaggcggcaacgccatgggcaactacctcgaggcaaggctcacggacggacgcgccgtgcagatcgacttccacgacaaccccgcatggaaggacacggaccgtctggccggccggatcgaggtgtcctacgccaaccgcccacaagcggaatggcaatacgacgacaacgacatggccgaccgcgaacacaccgtcatcgacccctccgaccccgacgcggagggaagactcgccaaggcggtgaaggcgagggaggacgccggatacctcgtgacgaaggtcgaggaggatccggccatactctacgagcggcaccgcaaggcgtcctgcctacacgcgagccacatcctggaacgatacgactcccccgacccgaccgcggtcgggatcctccacggcatcgtaagcgaggtcaacgctcacgaccccgagaacgacatcgccgcctacctcacctacccgtccgacaaggcggtccagctcgccggcgacggtctcaccgaagcggacatcgcggagaaacgcgagatgggcggatgggacccgcggacggacccgctcatgcgcatcaacgagcagggcgactggacgggcgtcacccaacagcaggccgaccagctcgtctgggacaaccgcgacgagatcctcgcccgcgcctcatacgacagtgaactgtccacgtggacgctccaccagctcgaccagctgaaggagccccagccggcccagagcctggaccgcgaccggccggaaccggatcgcgaagcacccgcacagacagaatccacgacaaagcgtcgcgggccaagactgtagatcctctccagccacgggcggcgcgcttccgcgcagccccgcattcattccacacgaaggaacagaagacacacatgacaacagaagcaaacgaccagccggaacccgtcatctggttcgagggcaccctcatcagagatccgcagccgcacggaggacaggacgactggctgctcgagacactggccgacgccgacgggccgaagatcaccatccatgccagcggcgaggatcactcggcgaacatccgcgacaacgcgcacaagggatctcgcctcatggtcaaaggcaccgccggagacgagggctccggcatcgatatcgaggccacaagcctcgcattcgaccccagccacgacgagccggacggggagcaatgacacggaccaccgtcagcggcatcagaccggacaagaccggcaccggcgaatggatcgacatcaacagtcacgtcggccggctcatgtccacgatcatggccggcggccgaccattcagcatcgacgccgacccggccggcatgaccatcgtcacgcccctcccacccccggcagccggcccggacacggaagcggccggcgggaacgactccaagaccggaacggacccggacgaagggcggatcaccagcaggaagacgctgtacgaacggttcaagacccgactcaacgagaacctcaacgaaagaaaacaatagaaaggaacaaccatggaacgaataagaggaatcgccatcaagacactgaccatcctcgcgggattctggctcgccgacctcgcggccacccgcgtccaggccggcatcacggccggcgaaagcgtggaacggatcatggacgacatgacgaccatgctccagcatccgaccgccctgggattcgaccggaccagcctcctgtgcggactgggcggcgcgtgcgctgtcggcctgttccacctctaccggtggagcacgagccaacgcaactggagggacggcgaggagtacgggtccgcacgctggtccaccagccgggagatggccccatacaccgacaacgacaccaggcagaacctccagatgacagccaccgagggcctgagcctcgacgcccaggccacgcgacgcaacctcaacaccaccgtgatcggcggatccggttcaggcaagaccgccacgcacgtcatccccaacatcctcaagggcagcatgaactacgcctgcaccgacccgaagggcgaactctacgcgaagaccagcggaaaactgaagaagatgggctacacggtcaaacagctcgacctggtggacctgaccagcgagacgaaattcaaccccatgcgctacatcgaccccgacaagcccgacgtggcgatcatgcgcctggtcaccaacatcatggacaacaccaacggttccacacccaaggagcaccagaccgacgacttctggaccaaatccgaacgcagcctgctgaccgcgctcaccgcgttcgtctactacctgcccgacgacatcctcaaggactgcctgaacatcgacgcaggccagaccctcaacgcggtcgccgacatgcgcgatctgctcgaagccagcgaacaggacgagaccaaggaaagccaggtcgacgccgtcgcccggaccgccacggagatctatgaggagacccgcgccgaatggaatcgcgacggcgcggaccacgacgatccggacctgcgcgaggcatggcgtctcgcccagggcctgaagttcgcggcccgccagtacaggcccttcacccagggcgcgggagagaccaagaagggcatcatcatcagcctcggcgtgcgtctcgccccattgacagtcggcccggtccgggagatcctctccgacgacaacctcggtatcgaccggatcggcggatatgcggacgagcacaagggcggatacaagcatcccaacgggaagacggccatcttcctcgccctgccagacgaggaccccaccttcaactttttggccgcgatcttctaccagtgcctgttcgacagcatcatccgccgctgccgcacctaccccggcgaatgccttgccacaccattgcactgcttcctcgacgagttcgccaacgtgggacgcatcccgaacttcgacaagctcatcgccacgatccgctcgcgcaaggtcagcgtcagtatcatcctccagaccatcgcccagctcaagacgatgtacaaggactcgtgggaaaccatcgtaggcaactgcgactcggtgctgttcctcggcggcaacgagcagtccaccactgaatggctcagcaagctgctcggcaaggaaaccatcgacatccgcaccaccagcgactcgaagggcgtgtccggcagccacaccaccaactaccagcgcaccggacgcgaactcctcacacccgacgagctcgcgcaattggacaacgacaaatgcatctacagcctgcgaggactccacccgttcctcagccgcaaggcatggccgggaaccgccatcgccagaccgaaatccacgctcaggcactccaaagaatggaaggcagcggcatgaagcccaacagctacacctttcacgaatcagagccccggatcgctgccaggcaatccggtgcccccgtctgatggcgtgggcacggaccatcccggcgaggctccgcccgtattggtggaggacgacgagcctcccgaagacgggcgtcgtccggttccggaaccggatccggaacttccttgggattgcgattggcttcctcccgaatatgagggcgtttgccgctgtggagccgattgggattgcgacgcctgggcctgctgctgcgcggcggcggcagccgcggccgcttcctgttctgccttggccttcgcctccgcgtcggccttttccttcgccgtcttcgattcgttgacctctttcacggctttcgcgatcgcatccgcgtcacgggtcttgaccgccttcagcagggtctcccgggtcttgtcgtccgccaccctgccgtcggtctgcttgtacagcgcgttcgcgtcgtccacggtcttgtcgagcttgctgtcggcgacggccttggttgcggccttgaggtcggtgagacggttcttgagctctttggtcgttctgtgcagcgacgccgtggtcctgtccaggtcggatgtggcggcgtcggacgcgcaggaaccgctgatggtggtcgtctttgcgcccaggagccggttcaacgcatcaagggtcttgggatccgcgacctggccgcgactggtgcctttcaatagtttggaggctttggccgtggtcctgtccaggtcggactggatggtcctgcgtgtcgcttcggccgagtcgcatgcgctgattgcggtctcatgcgcctcttgccgcatggcggcgacgtggcggtttttgatttgcagtcccatccaggacacggctatgaggctcgcggccatgacgatcgcgacgagcgctttcccggccgggaagacgcggcgcaccttcagatcgtcgaggtcggccgagtaggtgacggccgccgacagccctcctggtctttcggtcttcccggtttccgtcggctccggttccgatatgggcgggaggctcattgtggttggctccggggcggcgacctgttcgagcgccgcgaaatcgccgtcggcgtccttcagggccttctccgcggaatcgtcgggatgggactgttccggctcggcggtccgggtctcatccacagattccatagatgccggcacgggttcctgccccggctcgtcttccggcggcagcggcgcggacggtatggcgacgcgacggcggccgcgcatggacgcgggcggcagcggcgcggcaccggccgtgtcaaagccttgctcctgcgcggtatgccaccattcggcgagctccggccacgcgtgtggatgttcggcgatcaggcgcatccatggacgccaaccgggctcgttggccatggcgtacagctggtcgaccgtaagcttggggctgagaatcggctcacccgtcttcctgtcgatcctggtcattcctctccgccctcgtctttgatgaggactggctgatcctgttcgtttgccctcatcacttttgttcctctggtttgccttcatgcacccggtatccgccttccaatgggcccttgaccgccgcgcatcgccagccgtcgtcagtgagcgtgtagtcaagcacccaggatgcctccagcccggtggatacggcgcatgtcaccacccgccgccccatggacacggggaagccggtgaactcggtctcgggcaatggctgcggggctatggatgatgccggtatgtcgaggccggcggcatccggcgtgaagtattcgccttcgagttggcctcgttcgtcgcccatgtagacgccgagcgctttcggcgcgagatcggcgcacggatcatcctccgtcggcgtcgccggctcggtctcttcgtctccagccgttttttgtccgggttcggttttcgttcgcggccgggcgacggtgctttgcgtgtcctccgcggttccgttgccggcgcatatcaccgcgacgtttcctcccaggatgaggagcgcgaccgcaaatcccgtcgcggcgatgatcctgttcctctttggttccatgcttggttttcctttcaatggatgtagcggacgccacttccggctgcggccagttgggaggcgctgatttcgcgtgtggatacgacgccgaggccaagcacgttggactcgctgatcaggatcgacccgtccccgcggacctcctcgaccatggcgacatgcccgtagccggcggacgcgcccaatactcccggttggaacacgatgacgctgccggcggatggggagccgtccaccgtgtagccggccgacgccgcggaacctgcccatgtggcggcgttgccccaccctggtatcggttttcctatgtcggctcttctggtcgcggcccaccaggtgcactgcccccatgggtatctcgtgtccggcgtgatgccggccgtggacacgatgccgccggagaccgtcagtttcggttcgagggagccgaccgtaccaccctcggcggtccccgttgcggtgtatttggtcgctgcaagttccttgatccgccgcacatagttgatggtttcctcgaagggcggcaccatgccgtatctgagcacgctacccaggccagcgttgtacgccgcgagggtcagctccaacgtgtcgccggtcagtttcccggacttcttggccgtctcgacctgcgaggcgaggccgcacatgtagttgccctggctccagatcgcgtcgtgcgggttccagatgtcggccttgccgtctccgtcgccgtccttgcccgcggacgcccaggtggacggcatgaactgcgcaatgccctgcgctccggcggagctgccggccttcggattccaaccggactcctgatcgatctgggcggcgatgacgcccggcgtgacgacctggcagatggatccggcgcggatcacatcggcctcgtattccgcgggcacgcccgagaccgtggattcgctggcgctggatcccaggaacgcgcccatggcggccagaagcacgccgagcaccgcgagcatggccgcgatgacgggcatgatgggaaggctgatggaggcggcccccgctatggctcgggatacgctcgtgcgcgcgaagttcgcggcggcgcgggcggcacgcatggcggcctgtccggtggctttcacgctgcgtaccgccttgacgggcgcgcggcgacgccgccagatgaatttggccgacgagttgacgcccctcacgcctgtgcgtgccgctttgaaggacaggtcgcgcgtggcgcttcccagcttcgacgcgaagtcgtcgtcggcagcggtgagcctcgcgccggtcttgtccatccagcccatgccggtggatcccatccgtttgacgccccggcctgcttttccaagacctgcgcctatgcgtttgccgatccgccggctcgccttgcctttcgcggtgaacttgccgatcttctcactgggcttcgcctcggacagcaccttgggtttaccgaccgccttgcgcatcccattgcccgaccgcagggcgcgtttgccgcggttcatgacgcggcgcgccctgccggccgtccagcccacgccgtgcatggtggaggacatgccgtatatgccggcgcggcccgccatctcggcggcggtgtggcccatggaatcggcgatgtcggtccggtccgcaccgaactgcgcggcgctggacaccacgccagtggccgcgcgtccgatgcgggcgcgcgtgcctccggcgtggtgggcttgggttccgctcatgcgtttactttccttcctggaaggtcgtggaatacagacggtagaggtcgccgcccgcggggatgcgaccgtcgaacggcacgtaagcgctgccgatcttcatgagtccctggccgggcagcacgccggtgaagtactgacgctgctcctcactcagggtcagcagctcgcacagggcgtccgcgtcggtgctgttctggctcaggagcatgaggaaatcgctgttggacagcatctcgcgcgcgtcctggaggtcgaggatctcctcgacgttctgcgtgatgccggtgacgccgagcccgtatttgcgggcgcgcttgtagatgtccttgaactgggcggcggcgtactggttggagaagaagcggtggaactcgtcgacgtacagccaggtgcgccgcccgttggccttgttgcggatgacgcggttccacacctggtcgatgacgaccatcatgccgaacgtgcgcagctcgccggacaggccggacacgtcgaacacggtgaaccggttggacaggtccacgttggtctgcccgttgaagccgctcatggagccggtgatgtacgggttgagcgcgtcggcgaggtaccggctcacctggtcgccgcccgcctgcaattcgtcgtgcaggtcctgcaatgtgggctggaccactcccccgccctggttgcggtagcgcgtgtacaggttgctgacgcactggtcgacgagtcccttctggagcgggtcgaggccgtcgatgccgcctatgagcgcgccgatcatggagaccacgttgttggtcttgtccttgacagggtcggaagccgagtcgtcctccaggacgatgtccatcgggttgacgcgcgtgccggtgccggcgctgatctggatgatctgtccgccgaacgcggccgcgagggcgaggtattcgcgttccgggtcgatgacgatcacctcgtcgtcacggttgaggaacatgccggcgatctcctgtttgacggtgaaggatttgccgccgccggacgtgccgagcacgaatccgttggagttcatgtggctgcgccggtccgcgaggatcgggttgccgctcctcgcgttgcttccgtagaacagtccgtgcggctcgaacacctcctgcgtggtgaacgggatgaggatggccgcgctgttcgtggtcagggtgcgtttcatgggcagagggttgttgcccagcggcagttcggcggtcagtccttccatctgcatgaacttgaggctctcggccgtgcaggactgcgcgttgaccttggccttcacgttcctgcacgcgacttccagctcctcctggcttgccgcggacactccgatcacgatgatcgagtccacgagcctctggttggtggagcgcagctcgtcgcgcagttggccgagctgttcctgctggtcggcgaggtcatcgggaaggtcgtcggggtcgaggccctgtttgcggttcttgcgccgctggtccatgacctgcatcttgacctcggcgttcttgcggcgcacgagcgtcatgctttcgccgcggtccatggggcgaggtggatgctcacgtcgacgcgggcgcgcagtccggtcaggtcgttgaccagctggtcggacagttccggcggcaggctggacacccacatggtgcgatgcaggtatttcgagtccagggattcgatgtccagctggatggggttgcgcgcgtcgatgctccacgggcacacgaggtccttggtgtcgggcttgccgggctgatgctcgaaccggcgttcgtcgaaccggaactcctcgccgggccggagcacctcggccatgaggcgcagccggtgctcgcggtcgagccgggtggccttgcatgcgtcgatggagcgcatctggctgacgaggttgttgcacagggcgttcagggtcgcgacggcggcctgctcgtcgctttcgcggacggtgacggtcagggtcttgacggtgctggtgttgcggctgacggattcgagtttgccttgggcgagacggttgtagtcgagccggtagtggtcgaggctgtcaccggtctcgtccatcatcacgtcggcgaggatctctcgcacgccgcgtgagcgcgtgtaggaggcgatctgcacgctttgcccggcctcgaagctgttgatgagcttggcccaccggtcgatgatctccatctgatgggattccgggctcagctggtagttgatgtcctggaagaggatggtggcgctccaccgtccgtcgcccaggctggcgatcccgttgcgcagcatcgcgtcgtagccgatgagctgcttgacgcccttcggcagacgcgtcgccttctttctccgcgccttcgccctggcttcggcaccgccttcagccggcgcggcctggggtttcttctttccgaacattcctcacctttccttgatcgtcggtttcgcgccggtgcggtatggtctgcccggaccgtcgagcaggtagacctcgcgctgcgtgtagtggcgcaggatgtatttcaggtatttctcgggcatgaggccctttggcctcacccatccccatatggccacgggcaggccgggcgggaagatcaggtacatggcgaggttggggtccatgcccaggccgaaccacaggccgatgtaccctcccccgcacacgacggcgaggatgacggcggcgaggcactgccgccagctcatccccatgaacaccttcgactcgatggtggtcagttccctgtagacgggcatctgcaacgccatgatgattgcttcctttcgtggattgcgttgtgtttcattcgccgccgaagagcttcttggcgacggagttggccgccatgacgatgccgatgagcatgacgctcgccaagagcaggccgatgaagttgtccatcacccagccggagaggctgtcgccatccttgaacttgctcgggttgagcgtgccgcccacgagcgtgcggtacatgaggatcgccagatacagggtcgcgcactggaacaccagagacgcgtactgcttgaagtagttgatgccccactggcgggtctcctcctgggcgatgaaagcgatcggcagcgggttgaacgcggtgagcatgtatatctgcacgaaacgcaggaggatgacgacggtgacgacgatggtcgcgcccttggagacgaggaacgggatgagcagcaggatcaggcacggtatctggcccatccagccggcggagtctatggcgtcgcgcatgctgtcgccaaggccgaggcccgacgacgcgccggtggtgagcgccgccgaatggatgccgccgagcacgccgtcgccgacctcgtcgatggcctggagcatgagctcgctgtgctgggccgcggtgaacacgagcgtgagcttgaacatcgccatggcgacgagcttgacgcccagctctcggtcgccgtccgcccgggtgctgaccctggcgagttccaggacgcacatgatctccagtatcgtgctggctatgggtttgaccgccgagcgggcgacggtcaggctcagctggtacatgcccgcgttgtattcggcgggggtcttcagcaggtcggccacaaggtcgtcgccgacgccggaccctatcgagttgaggatgccgacgatgaaatcgaccatgcgcggcctcccgtctacagggcgatgttggagaacagggccgcggccgcgatgatcagaccgccgccgacgacctgccagacgcccgactgggtggcggggccgttctggtccttcagtcctccggccagggtgatcacgccccacacggcccacaggccaccgccgatgatggcgaactggctgaaaagctgcaacgcgctggtgacgacgctgccgctgtctgccgcgatggtggttccgtacatgatggtttcctttcgacttgttttggatgacatgaccacggtatggccgtcgagaaggctccggtttggacgttcccgacgaacccgaagaggctcggacgatggtatggaaaaggcctcgccgaccgttcgccggtggggtcgtcggtgagcttgaggtccctggcccggaaccacgcgccttcacccgtgctggaatcgaccttgctggtgttggtgatcttgaacgcgatctccagcgagtcgccgtccatcttgagcgcctgcttgacgtcgtcgcggtcgccgagcctctcgccggatttcacgtcgtacttctccaggtgcaggcccggggtcatgtccggcgtgcgggtccacacgacgttggattcgaggcccttgtcgttgaagtgctcggtgaaccggttctcgacgcggccggcggtcttgatgcgcttgcactggatatacgcggtccagtcgttctcgtgctccacgtcggcggacacgagcgcgcggtacgcgtccgtggcggtgatgacggcggtgccatccttgtagtcgagggtgaacaggtcaccgccgaacttctcggaatcgaagccgctgccggcgagcttgtcgcccttggccgtgatcacggcgccatccttgtgcaggtcgcgcgccgcgtacacggcccacacggcccacaggccgcctccgatgatcgcgaactggctgaagaggtcgagcgcgctggtcaccacgttggatcccgccgcgaggatgatgctgtcatgtccgttcattcgtccctgccttctttccttggcttggcttgtttgacaggtcaaaggtaaggcgcgcgcgacggggccgggtcggacaccttcgcggggggacgccgcatcttccgttggatatggagcagttggaacacttttatctcaattgaatcggaatgtcccgcgagcttcagcatgttgcggaatgtcaatagactatacttggcaaacgtggaacaggattcagatattaaagatgaaattgtccagcttgttaaatttggacttggtgggcagttgaatgactttcgtatgtacgtgtctagattgatacgcaaatacagggtcggtgatgcgtcgttctcaaaggcgttggaatcgttacttcagtccagcgatgtgcccgatatgacaccgataagggaattaggccatgcgtcacgtcggactggggaggcgccgatccttcccgtgggccaacgctccgatgtggagaagccattcctgcctgagcggattgtcaaacaggtagagggactgctcgaggagcgcgagaacgcgtcggtcctcgcccttaacggtctttccccgacctcgacggcgatttttaccggtcctcccggagtggggaaaaccatgaccgcacggtggatagcctcccagctcggaatgcctatgtaccggcttgatctggccgagacgatcggcaggcatctcggggagtcgggcaacaacatcaaagcagcattttcgaaggttcgtgtcactccgggaattctcttcctcgatgagatcgacgccatcgcgaagaccaggtcggacgactcggacattggcgagatgaagcgcgtagtgactgttctcctgcaggaacttgatgacaggaacccggcgagcctcatactcgcggcaacgaacaacatgtcactcatcgatcccgccgtatggcgtcggttcgagttacgaatagatttccctatgccggacgagaagcagatcatgaatgcgcttgaaagcgatttcagcgcatcggacagtcttggaggggtttcggccccgtggattgaagccctgggcatcgtgatgaagggggcgcctttcagcgaggtgagatccgtcgcgatgcgcataaggaaacggtgtgtgctgaggcggtgtccggcggaggatgccataaccgaatacataagggagaacacggaagggctgacccacgcgcagaggattagccttgcggtcgcgctcgtggagaccggcgcggtgacgcaacggctcgcctccgagatgaccggggtgtcgcgccagactatacgacgcagaactgagaaaacgaattcgaaaggatgattcatgggacggcattatctgataggacacggcgaacggctgtctgaaccgattgttcttccccgcggcggggcgacgccgaaagatatctacacatacgaggaatcgcgtgcgcggttgcagccggaactgcacagtgcgattgcaaatctgccggacgatccggccctcgcgccgaatgatgtgcacgtcttgcagatggtgttgcatccgaagtatctggcaaagtcttatcatccatccgggctgctcagggcggccggcctgtccttggtgggcagcaagccggtacgaatcacaacggccgacgatccagacaaaggtgcacgtctgtctaggacgttgctggtggcgggacacaggcaatcgctggagcatttcgattccctgctgcaggaccccgacgttcgatgtgaagagtacgcaggtatcaaggacatcgtcagaatcgagcgtatcgacaactacgcattcgatgacaagtatcatcccgcgccttccaatgacgcatggtacgaactggttctccatgagctggacgaggatttggcgccagataatacccagaagttcttggagctcgcggaaaggctcggagtaaacgtcgaagagcgaatgaacttcaaggccaataatctgttgtatcttccgattcggggaccggaagaagccgtcaaacggcttgctgaatacttcagcgtccgcgctctgcgcccaatgccgaggttggggctgagcccaatcagctccgcgaggagcattcgggaacccgttacgcttcccgaacctccgagtacggcgtctcagctgggggttgcggtgcttgacggagggctgccgccggataacccgatatcgtcatgggtggactatatcaaggcgaatcccgatgccgatgatgacgagcggtttttggaacacgggttgggggtatgctcggcgctactgttcggcagccttaagtccggccagcagccgctgcgcacgcggataacggcggtgagggtgcttgattcagaaacgaggtccgatgatccgatcgcgatgtataaagtgctcaataacatcgagaatgtgttggaatcgtaccccttccactacgtcaatctcagcctcggtccagatttgccgattgaggatgacgatgtgagcgcatggacgtcggttcttgaccagattctttcttccaaggacatgctgctcagcgtggcggtcggtaacaacggtgaaggggatgccgaaagcgggaacaaccgcatcgaatcaccgggtgacgcagtcaacgccctcggagtcggggcgtgtgattctgaggatgtgtattggatgagagccccgtattctgctgtcggcccggggcgaagtcccgggatcgtcaagcccgatttggtggcgttcggcggaacggagggcaatgaattcatggtgcttggccctggaacgtcacctgcagcggtaccggttatgggaacgagttttgccgcgcccaacgcgctacggcaggctgtgcgtatacgcgagatctgcggcccggaaataactccgctggtggcgaaaacgctgctgattcatgcagcggaacgcagaaaggaagacaatatgagcgaaatcggatgggggaaggttccatccgacgccaccgaaatcgtcacgactgaggacgggcgtgctcttgtcatctacaagggcagcatcaggccggggaagatagtgcgggcgaccatacccgtgccgccacggcttgatcatggtgacgtaaagattagagcgacgttttcttttacctgccgggtggatccccaatccccggattcatatacgcgttctacgcttgaggtcacgttcaggcctgacgcgaaccgaattgatgagggaaagaaaacggcaaggaccgattccttcttcagccgcaaccgcatgggaacgtccagtctatatcccgtagaggccgagagaagatcggatcaggggaagtgggagacggtactgcactccgagaggcaattcaaggcagcgagactcgccaagccggtgtttgacatccactataacgcccgtgaagagggtggcgcatcgctcagcgtaacggacaagttggaatacgcgcttgcgattacgatttccgccccaaagatcgggaatctccatcagctgatactggacgcatatccccagctgatttctcttgatcctctccttggcgtgtgacgcgcgtttcgtcggggttcgccggtgtccggtgtccgacggttcggtgcgcaagggaaaggggtggcaggccggatccgacctcattgggatccggtctgccaccccgttctggtttccatggtgcgcgggaaggggttcccgcggcgtgcccccgccgggagtcgaacccggcgccgtcacaaaggagaaaacaaagacggtaccggtgggggccttgggcgcgtccgggaagggaaaggatccgggcgcgcccgtgggcctgtacggcggatcatggggaacggtccgccgcacgggcccggggtcaggttcgtcggatcactcctccgagccctcggtgtcggccggggccttcgcctcgcgtcggcgggacgcgatcagcagggccgcgcctccgctgagcacgacgaccgcggccagcgcgatcagcgcgatgcccacgccggtctgggcgaggctcttgcggtagccgttccagtcgtcggtggcggactccaccttggtgtccgcgcagtagtccttgccgtcgatggtcacgacgtcatcggacttgctctcggtctcggcctcgggcttggagccgtactcgtcgtccgaggtgccgtcaccgaacggggccgacgtgtcgaccggacattcggtcaacggggtgccggtgaccttggctcggtcggtgtgggtcttggtgacgcccttgagcgtgccggtgacctcgacgctttcgccgggcttgagcaccttggtgtcccagtcggccgggtacttgaggtccacgacctcgccgtcgccgacgatggtggagtcctcgagcttgatgtccttggtgcggaacaccgcgccctgcttcgtgtcggggtcggtcttgctcgtgttcgtgatggtgaacacgatctccgtgtcgccggagacggtcaaagcgtccttcgaattgtcgcggtcgccgttcggccagccggacttgcggtcccacttctggacgtcgatgctcggggtcatgtccggggtgcgggtccacacgacgttggattcgagagtcttgtcgttgtagtgctccgtgaactgattctcgtggcggtcggtcacggcgaggcgcttgcactggatgtaggcgcgccagccggcctcatgggagtcgtcggacacgagggccctgtagcggtcggtcgcttcgatggtgacgacgttgcggccgtcgacggtggccgcggagagggtgaagaggtcgccgccgagcttcgagctgtcgaaaccggagccggcgatcctgtcgcccttggacgcgaggacctcgccgcctgaaagcaggtcgcgggtcgcgtacacggcccactggccggtgtattcgtcgaaggccgggtcgagggagtcgacgatgtcccacttgtcgacctgcgggtaggcgcggttggccggcaggatggagctgtcgagctggtagaggaagctgcggcccttgtagatgctcttgccgttggcggatgcgccgccgaccttcacggtgacgtccttggccgggttgatgggcttcagggggttcgtgacctcgttggtgtccttgcggatcttgttgagcacctgcgtggccttgttcttcacggtgtagccgtcggtgaccttgatgacggtcatcggcatggtcacggtgtacgtgtggccgaggagcgtctggtcgatggcgggctgggtgagcgggtcatgctcgtcggactcgctgtaggtcttgaggtcttccggctgtgggtcgcccttgacggtctcgcccgtcgcggggatctcggtgtcgaccagcttggcgtaggcgtagagcgcgccgtccttgtcctggatgttgaacttgtcggtgacgtccttgccggtctcgtcggtgatctccacgttggtggcgtcgagtttcaggtactcgtcgtcgtagtcgtcggtcatgccgagcctccagaccttgtaggcctggttgtcctgcctggcgtcgatgtcgacgcggtagtagatctcgtctcccagcagggcggtcttgccgtcgatgctgatcgtcgggtccttctgcgtgtccttcttgacggggtcgagcttcggcgggatgttgaacacctcgttgctcggggtgatcgagttgttgagggtcagcacccacttgttgccgaccttgtggtcggtgggggcgtcgtcggcgacggttccctcgaagcggacctggaggcgggggctggtgccggcgcgccactggctgatcgtctcctggtcggtgacggtcagggtgaacatgtgcttggaatcatcccacgtggtcgtgtacttcttcttggacaccggcttgccggtgttcaggtccatcatctccagggtctgcttgtccggtttcagataggcgtcgtaggagtcggtgaagctcacggacttgacctcgtaggcgaggtcggccggcagttgcggctgggtgttgagctggtattcgaccttctggccgagctggacgactttgccgtccacgctctcctggtcgccgccctggctcgcctcggacacgacgtccttcttgaccggtgggatgtagccgcagatctgcggttcgttggtcggttcggtgtggttgttcacggtctcggagccgctgttggtcaggttcttgccggtcggtgcggcgcagaaggtgagctcgtcgcccgcggccttgccgtagtccttgcggacctgttccgcgcccttgccgtcggcgaagttgatcttgccggggatcaggagcgtgacctgcttcgggttcttcagtcccttgagccctttgaggtaggaggtcttggcggcggcggtggccttggtgccttggactgtgatgtcgaactggtcggtcacgtccttgccagtgttgacgatgtcgctcacgctgctttcgcggtcggtgcccgcttcggcctcgtagacgcggatgttcttcgtgtcggcgtcgaagatgtagtcggcggcagtccagtcgtccgtgaggacgagcttcttgggcgcttggatcagattcttgccgatggtgccgttgacgacgctgccgagacggctaccgtcgaggtaggtgtgcgagtcgccgccggtcttgttggtctcctgcgggtcgatgacggcctgccatctgccgttctgctcgaagatccaggacttgtccgggttcggctgccaggtgtcgaactccttgctgccggcgtcggcctcgggctcctggttccacttgccggtcgcgtggtccttgaccttcctgaagtccttcggcttgctgacggtgacgtcaaagctgaactcgatctcgtggtccaatggcatctcgcccttgtcggccgtgcgcacggcggtcacggtgttcgcggccttgtcccatccgatctggaactcgccgctcacgtcgcggtcgttgtcgctcttgtcgacgagacggtagttgtcgacggtgcagtcgacgccgtcggcggtgatctcgtccttgaacgccatctcgtagccgcccttgccggtgccgtaggtgatgacggtgcggttggtcatgccgtccgcgctcacgccctcgtcgatggtcttgaccggcggggatggcggttcggcgctcacgctccaggtctcggccggatccttgtcggccgtgtcgacggccgcgttcatcctgccctgcttggcgatctggatgtcgatccagtattgtccttcctgccagtggttcatgccgaagtcggcgggcgtggcgaggttgtcgagccgggtgtcgccgttgttggcgaaggtgatcggcttgctgaccgtcttggcggcgacgtagccgttcttctggccctcgtagtggatgatggcggtgccgttcaggctttccttgatgctgctgccgttgttgctcgcgtgcaggatgtcgctgatcgggtcggtggagccgaccttcagatcggtcctctgcccgtgcgtggtggagacgctcagcgtatagttcggcggggcgggctggtacttgtcaagcgcgatgatgacgatgctggccgtgctggacacgtaccgttccatgagcttgtccacgctcgtggacggatcatcatcaaacgcggtagaggtcttatagtgacgagtcccagcatagttgtaatcgcctggtgcgatgtacttgttccagttgtccttccacacgctctggtcgtagatgccggacccgttccatacgctggtggtcgtgccgttgcccgagaccgcgccgaccgcgacgacacggcagtcgccgtcgccctcgcctggatggcgctggtggaaaccgtccacgcaacggtcgttcgcatccttcaacgcggctgcggccttgccggctgagtcgtccatcctcacgcccgcgttggccatggcgctgctcacgctgttgatgtcggtcgccggaccccatgagccggacgcgtcgtccttgtactgccagaactgcgttgccgcgccgctgccgccggtgccgggcctgttgccggcctcgccgccggcgtaggcggtgcccgcggtcaggccgccagccagggtgaccacggccgtcagcaacgccaacgccttccgtttattattggtggaaaccaatgttcctctcctttcagagattctgcacttgactatgtcgggtcgggaatcgcgatccccgaccgataccattgcaacccggtttcactgactccggtttggacattcgcgcaggagacaggaaagggccgtcccacggatgttcgtggaacggccctgaaagagaaacggagtcgaccggcttaatgttggattgggatggagcaatcctccaaactacaggcacctggatcaccgtgtccgccgctggtcggccccgaccagcctgacccaccggacgacgagccgcccgtcgaatccgaggatgcgcccgccgaaccggcgtttgtgtaggagcggcccgaactcgtgccggcgttcgtataggacggcgtgtacgactgggcctgccgttgcgactgtgcggccgcagcggcggcggcctgagccgcggcctcctgttcggctttcgccttcgcggcggcctccgcgtccgccttctccctcgccgtcttcgattcgttgacctctttcacggcttttgcgatggcgtccgcgtcgcgttttttgatggcgtccagcaggcttgcgcgggtcttgtcgtccgccaccttgccgtcggtctgcttgtacagcgcgttcgcgtcgtccacggtcttgtcgagtttggacgtttcgaccgcgttcaccagcctgttcagggacttcccgtgcgtccagtaccatgccgtgttcgcggtgatggccttcgtggccgtgaccacggcgtcccttgaatccgctttgcaggacacggtcttcggcgtggatgccttcatggccttggataggacgtcaagggtcttcgcgtccttcacgcttttcacgtcggtcttcgccatactggcggccttgccgttcaatagcgcgttgtacgcggtcgtcgcgacgtggagacgttcgctcgctgccgcgcagtccgccttggcttcggccatgagacgatccgtgtgggtcttccacacgatgccacccgccgcgagcagcgcaatgacggcaacggcgataatggcgacggcccgtccgcgatgcggtttcttcgtcttctcttccataggctcggacgaaagttcgaaggtctcctctttctctgtcatttgtcctccttgtttcttaggctcacagcttatcggatcggcggggccatccgcatcaagaatcatgatgcggtccatcattcccctccattcaagcccaagtacatctcgagggcggaatcgaccacctcctggatgcgcatgtcgtgttcggcggcgtaggtcttgagcctgcgtcgggtcgaggcgcgcaggctcacgctggtcttcacccagccctccgcgtcgttcggtttcacggtcctccggtttttcggtattccggtttccaccgattccggtcttccggtatccgccggttccgtccggtcgctgttgagcagcgcggtcaggtcgcgcggacggggcgtcaggttcatgttcctcacaggtcctcctccttgtccttgagctgtcgcatggtctgcttgagttcggcggccaggtcgcggtactcgtgcaggcgggacccgcgggggcgggtggatttcgcgttgaggatgtcctggcgcttcgggatcagcgtctcgaagcacgcgatgtccgagtcgtcgatccacgccagcgcatcacgcagagcggtcgtgttggcctcggtgcggcacaggaggatcgcggcggggatgccacgattctcgcacaggtccttcaccccggcggcctggtcgaggtcgatgcggctggggctcgacgggatgaccacgaggtccgcgttgttcaccgattcgtccaacgcgcgcccgtacggggcggaatcgatcagcacccagtcgacggggtcgtcgagacggccgttgatcccgtgcaggtgcgcgatgtcggccggcgcggcggacatcacgtcgaacggcagcgggtcgtccagctcggcggccctgtaccaccagtccttcgcgtcgccctgcacgtccgcgtcggcgacgagcacacgctgctcgccccgggactggtccacgagggcgcaggccagaaacacggcgctcgtggtcttcatgctgccgcccttgccggtcgccaacgcgaccaccatcggctcgcggttcttcttgtcgttcatcggtttctccttatttcggtatgtcggtatccggtttttcggcattccggttagttggtttttcggtatttcggtttatgccgcgtcccacgcggatcgcgacgggaaacggtcagaagaggctgccctggaccaggcccttcggcacgggttcggtcggaaggaacagcggatcgtcgtgcgtgtattcgcggcgcgagcgttggcggcgtttggcccgtcgccagtagtcgcggccgccgcggcgcatgcgttcggcccagtccggatgttcggccagccagtcacggacccgactctgtgggatccggtgcaggccgtccacgtcgacgtgcaggtcgcgggcgatcagccgggcgaggatccagcggctcgcatagtcgagcccgccgtacacggccttgtccttccagccgttgacgagagcgcggctgatgcagtcaaggcgcatggggcacgcggcacacagcatgcggcccttgccgcgcatccgttcgtcgaccaggtcccggccatcgtcgtcggtcgtcgtgttccacatgcgatccgccatggccgggtcgaccgcggcgattctcgcgcaggccggcatcatgtcccgcccgttcatggccgccgtccttgcgtcatcggcgtcttgcgggcctggaggcgtcctatggcggtttcgccgggattgcgggcggcccatgcccgggcgtattggatcagcaggccgacggccttgggatggccgaggcgcttgttgcgccagtagacggcgtgcagctgccagatcaggtccgcgtgcccgtcgagctgcgggttggcgaggaggaattcgccgaagcccgcctcggaacagtcgatgcgcgtggtcatgccgtcgcctcccctccggccgtcgcgtcctggccgtccaattcggccagcgtcttcacggcccagtcgggcagccatggcgcagcatccggctccggcacggccgccggaaccgtctgcgcgtgtgcgtcgccgtctgtgcggccggctgcgaggatcatgtcgtcgttgagttcgtcccagtgtctggcgagggcccggccggtgcggatgcgtttgggccaccaatcgccgttcatggcgaagccgatcgcgtcgaccatcacgagggtgggccattgcgctccctggtcgacgagcctgcggtacaggccgatgatggccttgcggtcggctttggtcggtgagggcgtggccaggccgagcatcgagcgctgctcgccgagcgaggcgaggacccgtccggccgcttcggcgatctcggtgtcgtcctcgtcggattgttcggttctatttttttcggcggcggtcgccccgcttgcggggagatgccccgtaggggcagaggggaaggagggtttactcggagggtttacctggagggttttatccttatatatacagccctgcgagatttgcagtgctggaggtgcggcatttgcagtgctgggggtgcagctctcgcagtgctggccctgcgggatttgcagtgccgtttccgaatcgttttccagccctgcgagatttgcagtgctggaaatcggcttcgttccaacgttttccggcagcacgtccttggattcgccgttttccactatggtcgacgccatggggtccacggtcccgcccatggtcgcgggatcctgttccgccgtgtgcgtctccctgatccacgtgagggtcgacgggtcggattcgaccgcgaggtcccacacgacctggcagtactgtggcagacggttcctgccgcccttgccgaggcgcgcataacgttggtcgccgcggcggatgaacccccgctcctggagagtcttcaacgcggcgcgcacggtgcgttcgctcagttcggtgacgttgacgatggtcgcgatcttcggataggctgcggtgccgtcgtcgtccgcgcggtccgccaagtagacgagcacggccttcgcgctggcattgcccacatggcatctgaaggcccatgacagtgcgatgttgctcacggccgctcctcctcacgctgctgggcggcactgcgttcggtgtccagtctggcggcctgctcgtcgccgagacgtgccgcccggcacagggccaacaccatcagccacgagaacgcgacgaacacgatcaatacgattgcaagccagttcacgcgagtctcccttccatggacgggtgcgccatcatcgacgccagacgacgggaatcggtggaaaccggaccattatggcgggcgaatgccgccacaaccgggaaagtccaaaccggcgcctgaaaatcccggttacactcgggaaacacagagcaagacatgcggaatgctttagtaaagtcgttcatgtgtgatcactactccaagacaatgcattgagcggccacggaccgggatccggcaagatacgggatccgcggccgctcggaatattggttgcaccgcccgtccccgacgctccaacatcgggaacgggcatttttcttttatcgattgcagagaaagagagaattccaaatgagatcagaccatcgcaccacctccctcaacgaacctgatattcgtccggcgagaaaccacgccgaggcagaggaaatcggaagtctcctgctcgaagaaatcgcgcatccaggattcattcctggaccagagttcgtctggcagggtcaaggctttctcaggccgacactcataggcgcatggtcccagaaccgcttggtaggtggtgcctcgctcagtccatacatggaacacaccaaggcctttttggggattggtcgagcagacgcagcgcaggcggtcacacggctggtagctgaaacggacggcattgccgtcagccccgaccatcggcgcgaaggcatcggacgaaagatcaagctgttctgcgactccttcgcggcacagcaccacgctgcgatcatggtctccgtcaccaccaacgaagcagcggcaggcctcaacaacaaaacgaaacacatcgtgtttagacgatgcgacggcctcgtcatcaaatacgtagacacggtcggcaagccactcatatggcttcatgacctggatgggacgatccccgaagcggcatggtccgtctccgtactcggcaaaacgtatggaccgaccatagtcgtcggtgagcaacgggccatacggagtaaaaacacctcccaagacaacggcgtgcaatggatccttgccgttgatgcatttggcagcgacatcaacgcctagcttctccgggtcgatgacaatcggctcgtcaaaggcgaagtcgtccgccttcctcaccttcacatcgaaggacttgccaccgccggacgtgccgagtacatagccattgaataacttcatgccgccctcccctcggtcaacagcaggttcgccaccacccgttcgcgggtggagagctgtgcatcgacctcccggaaggcatgcgtgtaggcatgcgtgtaggcatgcgtggggcggagccaggtgtcggccagcccgcaggtctcgccaaggcgcagcgcgagcaaggcgcaggccgggcagaggttcagaatccgggaatcgagctggtcgatgtagtcgcgccagccgttttcggcgagaaacgcgtcgaagccgtcagacgtctcctcgttccagcgggtcgaccagattgctgtgtggcatccgtcgcacacctccacataatcgctccggccctccggccagttatactgctcgaaaattccaccagccatcacataacctcctgtacaccattggggaaagctgtctcatatggaatgagatcctgaacgaaatcggctgagagaccatactgttcgcggagaacggcacagtctctgcgctgccaatgtgtatgcagattgactttctgagtcacgctggccggcgactgatggagctgaacagcaagctggcgatgagttaatcccacctccgccatccacctcttcatattcgacatcgttaaccccatttcagctaagttaaaatttctaacctcagtatatgggttggtttttttaacctcaagttaggttaatttacagcgtgtcgaaatttaaaaaccgcatctccacaatgcggtttcagcactagagaaaggaaacttttaaatcaaagataaaattgagccaccatgacggcccattcctgcaaaggtcttttcacagaagcaatcagacgaggcttttgtccatccagaatatcctcatctatacaaaagtttccgaataacgcatcacaatatgcgcaaccatttgacatataacgccccgccctacgcgaagatcgatatttaatttgcttcgcggcgggatgcccagcaatttccaaaagctccttagcataacacatatctatgctttcccaagcttccaccaaggaaataccactttcgcagtcaaggggacaaagattagtaattgccacagaggtccgtccacatctccaacaggatcgatcaatgccatatatccctatatctacgacctcccccaagcgatgcaacgttttttgagcagcaggaagaaaaacattcgacaacatgagttcgcccatgcagacattttttcgccccgtaaatgcaaacatgcccaataggttagcaatattaaacattgtttgatatagttatctttatttggaaaggattaaccgatggaagtcacggaaacttcagaacaggtgaagatagaagcgcaacgttttgaagacgtagcgcgttacaacattcgccgctatatgcgattgaccggcaagattcagaaagacttagcccacgccttaggagtttcgaggcccactatcaccctgatgcttaaaggagaaacaaaacttaatttgcggcaagtgttccttattgccaaagctcttggcgtgacagtcgaagatctcatcgatgatacttattattgccaagatgaagagtttatgaaaaagctgaaaccgacgactgatgccgagaagccaggtgctttggtaggtgccggtgcgcccaggttccttgtcagtcccttcaaccccgacgctccggccgagggcggaatctcgggtgcggctaaaggtgccttggctggtttcgtgccatccggagtcctgtccggttcgggatccccgtccatgccctcaaagcatgacgggattggggttcccggccggtctcaagcccatgagacactaggaaccatgactacagttatcatgcgcaccactgaaggcgacatcaagatcaacctgttcgacgacaagaccccggaaaccgtggccaacttcctcggcctcgccactggcgagaaggaatgggccgacccattcaccggccagccgagccacaagccgttctacgatggtctgaccttccaccgcatcatcaaggatttcatgatccagggcggctgcccgctgggcaccggcactggcggcccgggctacaacttcgatgatgaaatcgttccaggactgaccttcgatcgcccatacctgctggccatggcaaacgccggcctgcgccgcggcatggacggcaagatccacggcaccaacggctcccagttcttcatcaccaccgtgccaaccgaatggctcaacggccatcacaccattttcggcgaagtcgcggatgacgagtccaaggccgtcgtcgacaagctcgactccgtggcaactgaccgttccgatgctccgctcgagccggtcggcatcacttccatcgaagtgctgaagtaagtttcgcatcaacaagacttacggcaaaacaatgaaaagcccctcgcgtgaggggcttttcattatctccgagagaatctacagcagttcagatgagtctcacgaccgcactgatcgtgtcatattttgcgtaaacgaggttcggcggagtccttggcaccggtgatacgatacacatcgaacacgccttcaatcttgcgcactgcggcaagcaaagtattcaaatgctgggggtcggccatttcgaagctgaattggctagtggccacacgatcggttcccgtggaaatggagccggaaataatgttcactccatggtcggaaagcacgcgcgtcacgtcgctcagcagatgcgggcgatcgagcgcctccgcctgaatcttgaccatgaacacgcccttggtactcgtccactgcacgtcaaccacacgttccggctgacgcttctgcaagtccagcatgttctggcaatccacacgatgcacggacacgccctgattgcgggtgatgaagccgatgatgttgtctcccggcaccggcatgcaacatcgggcgagcttgacccaaatgtctcccacgcccttgacggaaatgcccagcgagctggtggtcttcttggtgcgttccacctgcttgagcggcagagcctcctgctccacctcctcattcacctcgtcgctgcccgcatcacggaccagatgcgagatgacattctgcgtggaaatctgcccttcgccaatcgccacgaacacggcttcggcattggcaagattcagctcatcagcaacaccgaccaacgcctcgggagtcagcagagtcgcaatcggaagattgcgcttgcgcatggctcgtgtcagctcgtcacgaccttcttcgatggcctcggtacgacgctccttgctgaaccattggcgaattttgttgcgtgccttcgggctcttggtaaagctcaaccagtcacgagacggaccagccgattcggacttcgacgtaagcacctcgacggtgtcgccgttttcaagcttggtgtcgagcggtaccagacgtccgttcacgcgggcgcccatggtacggtggccgacttcggtatgcaccgcgtaagcgaaatcgatcggtgtcgcctcggcaggcaacgatacgatcttaccttttggagtgaacacgtagacttcggcagcacccagatcttccttcagggagccaaggaattcattggaatccggggtctcactcgtccagtcggcgagctgctgaatccacttgaaattgtcagcctcgctcagctcctggttctcgccacgtttacgatcggacttatcgggcgagctcagcgcacggccagcttgaccgttctccttgtacttccaatgcgcggcgataccgaattccgcacggcgatgcatgtcccacgtacgaatttgaatctcgacaggcttgccgccagggcccaccaccgtggtatgcaggctctggtacatgttgagctttggcatggcgatgtaatccttgaaacggcccggaacggggttccaacgcgcatgcaccgcacccaacgcggcatagcaatcctgaatcgtgtcgacgatgatgcgcacacccaccaaatcgtagatattcgcaaaatcatgaccacgtacgatcatcttctgataaatcgagaaatagtccttcggacgtcccgttacgtacgccgtaatgttctgttcgtcaagatcttcgttgatctccgcgagaatctgcttcaaatacacgtctcgctggcctgcgcgacgggccaccagcaccacgatctcgttgtagatcttcggatagagcactttgaagctgagctcttccaattcggttttgatcgcgttcatgccgagacgattggcaagtggcgcgtacacgtcaagcgtttcatgcgctttcttctgcgcgctcggagttttgacgtaacgccaggtacgcgcgttgtgcacacggtcggcgagtttgacgaccagcacacgcacgtcgcggctcatcgcgaccaccatcttgcgaatggtttcggcttgcgcggaatcgccgtattccatcttggaaagcttggtgacgccatcgaccaaaccggtcacggtatcgccgaactcggcgcggcactcatcgagcgtatagtcggtgtcctcaaccgtgtcgtgcaacaggccggcggccacaaccaacggtcccatgccgagatcggcaagaatctgcgccacggccaacgggtggatgatgtacggctcgcccgatttgcgccgttgcgaagaatgctgcttgaccgcacgctcataagcgcgctcaagaatgcttatgtcctcatcgggatgatggtattcgcacatcttcaggatcggctcaagcggatcaagcggattcgtgctgatctcgcagcccaacattcgggcagaatgaacctcacgctcaacgtcacccatcgtccacctcctcgctcgcaatgctccctatactacccgcgcctcaccgtgcatccgaggcatccgaccgcgtgttgcacggccaaatacccccgaaaccattgagacgtcagcgtttgccgattcctctgcgactaagccagtgcgttcagctcaggaagccacgcctgtggaaccaaacccacgctcagcgcgatccgacccaggcagcgtttccgcctcgatgaacttcgcttcgacgtaacgctgaataaccagctgcgcgatacggtctcccggatggaacgtcacggtgtgttccggatcaagattgatcagcggcaccttgatctcaccacggtaccccgcgtcgatggttcccggcgcattgagcacagtcacaccctgcttgacggcaagaccggaccgtggatgcaccagagccacgtaacccgctggaagggcgatcgccactcctgtaggcaccagtgcccgctggaacggcttcagcgtgacttcctccgtagtgcgcagatcagcgccagcgtcaccggcatgggcataatacaattccgccggatggtcaggatccagcgactttaccagaacctcgacgttttccggttcgttatatgcttcgtcgaacgccatcaggcagcgcactcctgacacaccggctgaccgtcgtcagtggtgtaggcaagctggctacggtgcttcaccaggaagcattcggagcagatgaactcgtcaccctgcataggaatgacggtcaccgaggcgtcctcattgctgaggtccgcaccgggcagctcgtaatcttcggcgatggcgttctcgtcatcgtccatatcgttggaagtgttctgggagctcttgcccaaagcctggagcgactcctcgtcctcgtctttgttgcgcggggaatcataatcctgtgccatcgagattcctttcgtcatctatggtgcttatgcgccataggatacatgacttttaccccgcataggatacacgaatcgaaatactcgtaaaatccgacacgtggggcacaatggaataaacagaaattcttgaaggaaagtggtgtgttgtgcctgggaattcactcgaggaagcgcggttcgatcatgtcagcgacaccggtgaactcgtctttgtttcaggtgccggaaagttcgctgtaaagatcgacgaagcgcttgaaagagccattttggaggccaagcagattcgttccgaagtacaggaggaacagaagacacgcatcccacccaccctgccgatttcgcaaattcaatcgttgattcgcgctggcgccgatcccgcgcgtgtcgcggaaagatattcgttaagcgaagcgcttgttcggcgtttctcggcttcggtcgaaacggaaaagcaatatgcgatcgagcagtttctcgccgttccagcgccgaaggaaagccgcgtacgcacgctttccgaactgatcgaacgcacttttgcggcagcgcgggtgcgcttggaagatgtgacttggaaggccaccagacttggcttggagccttggaaaatcagcgctcagttcgtctcctccggtcacaatgtctgcgcggaatggtcgtggaacatgcacgacaatgccgtaagctgcctgaattccgcagcacgaaaactcattggagaacaggacacgtcgaaagaaggacacgccgagaaacacgccgatgaaaattttctcgtgtcactgaatcttcccggaaattccgcacggtcggcgcgtatcgagcaaacggtgtccgcatggaacacgcccgagccgtccatgcctgcggcccgtcccgcggcagcgccttccgttccgatcgcgccaatcggcggcgtgtctaatgaatccgacacgcctgacacgccgaacgcgccagccatcgcatccgacttgcctctgccgagccgaccggagaaccctgctgcaggagccaatacagccagcgcaacaaacaccgacacacgcaataccgttccatccacgccggagcctgcttcgaacatggcgaacgagaaccagacacttgacccgcatagccagaacaccaccaaatcgaagcggcgtgccggacgttccgccgtgccaagctgggacgaaatcctgtttggcgactgaagttaggccacgtcgatcaagcagggaatgtcggattcgagcatggtgagcgacccgtgcacgcttggcaggtgcatcgccttttctgcttgcgtacgtgagtccacaatagtgacgactttggcggccgatacgatcacatcgccgatcatcggttcgacgcgagcttccaccggcccatacacgccttcatccattgcctgcgagcgcgtgcgcacctgcgcacggtcctccagcacgctgcgccatcgtgtggcgatgtcttctggattctcgccttgttccgcgtagagcatgacgcaacgcggctcaccgccgacatgggcgacgccctgcatgagccgctgatcctgtgcaatgtcaatcacagattcgggatcagtggtgatcataccgtggtccgccacaatcacaatcaatgtgcctttgggcacgctgcggcggagaaggccgagctgagcgtcaacacgctcgtacgtgccaatccatttgtcggaatcccaaccgtaattgtgcccgaccttatcggtatcacgcagatacaggtacgtcagtccgggcgtttttgccgcttgcgccgcggctgcaatccgttttcgcggatcatcgttggaaatgtagtcgctgccccgtaacgccgcctgcgtcaacgcggaaaaggcgaatttcggcagtccagaactggtcactcgaacatcctgcgcgctcagccgttcgaaaatggtcggttgttgctgcaattcaagcggaggaattgcgtttttgaaggaaatcagctggcatatttcatcggttttcggattgagctgcgtgtaaccggtcataccggtcataccggggcatgttcccgtaccgaaggtagacatggctgcgacggtggtgcttggcatgcatgttgcgatgggacgttgattggcagtgtcgttcatcagcgcacgcaagtagggggcatgccccagcctcatgttgagattccagtagccgagaccgtccacgagcgccacaaccacggaagtcgcatcgggaatgccgagcgctccctgcaaacgcttcggatcaggatggactgccgttggcatggggcatccgatagcgttggaaacagcaggaagtaccgatgacaggtgcaacgctcccccacgggttccttcagatgacacgtcatcgccgtagcatgccggttcggtcatggtgagcagctcttcgacgcttggcacttcaacactcataattcccattcaagcaccgcggcggtaccggctggtagcattgctaggttgattaccattacttttccgtgaggagattcaccgcatggtgtcgcaccgcaaaccggcaaaaccagcctttgacccgcgtacggtcaaagagaacatcgtcgaaacaccgttgaatgaggagatgagcaagtcgttcctcgaatacgcgtattcggtgatctatgcccgcgcgttgcccgatgccagagatggtctgaagccggtgcaacgccgcatcatctatcagatgggccagatgaatctcaatcctgatcgtccgtatatgaaatctgcccgtgtggtcggcgaggtgatgggcaagttgcacccgcatggcgattccgccatctatgaggcgatggttcgtcttgcgcagccgtttgcgatgcgattgccgttggtggatggccatggtaacttcggttcccttgacgacggtcctgcggcctcccgttacactgaggcgcgtatggcccaggcagcgcttggtatgaatgccaatatcggtgagaataccgttgatttcacgccgaattacgataacaagctgcaggagccgactgttttgcccgctgcgattccgaatctgctggtcaatggcggttccggtattgccgtcggcatggccacgaatatggcgacgcataatctgggcgaggtggttgccgcggccaagcatctgatgcatcatcctgatgccacgttggaagagcttatgcgctatgttccaggtccggactggccaagtggcggcgtgatcgttgggcgtaacggcattcgtgaggcgtatgagaccggacgtggcgcgttgaccacgcgttcagtgacgcatatcgaaaatgtgacggcccgtaagaaagccatcgtcgtgacggaactgccgttcatggtggggcccgaacgagtgctggaacgtatttccgagggtgtgaagaatcgcaagctggaaggtatttccggggtgatcgacttgacggatcgtcataacggcactcgtcttgtcattgaaatcaaaaccggtttcgatccgaacgccgtgcttgcgcaactgctcaagcacacgccgttgcaagacaatttcactatcaacaatgtggcgttggtcaacggccgcccgcacaccatgggtttgaaggaaatgcttcaggtgtgggtggaccatcgtcgtgtggtgattcgccgtcgtagcgaattccgtaagaagaaggcgttggagcgtctgcatttggtcgaaggccttctgcttgcgatggtcgacattgacgaagtgattcaggtgattcgttcgtctgacgatgctgatgccgcgaagacgaagctgattgccgtattcgatttggatgagattcaggcacagtacattcttgacttgcgtctgcgtcgtctgacgaaaatgagccgcatcgagcttgagtcggaacgtgacgatttgaagcaacgtatcgaagagttggatcgtattctcgcttccgccgaagcgctcgacaatgtggtgatctccgaaatggatgaggccgtcgccacgtatggcacgcctcgtcgaaccgtattgctggatgaggatgccgatggtaagcttgtgcctgttgtggcgcatggtgatgatggcgtgtccgcttcggctatggccgcagcccgtgccgccgcaacggtctcttccgcagcagctgatgttgccgcagccgctaaggcagcgacgaaggccggtgaagacaatgcggccgctgtggcattgcagattgacgacgaaccatgtgcggtgatgctgtcggccacgggtttgatcgcgcgaacctccgaagatgcgttggaacgttgggagaatcgttcttctgccgacaaacgtgtgagggacgatcagattatttcgattttccctaccaccacacgttcctcatatggtttgatcacatctgccggccgtctgattgtggcgcatgtcgtggagttgccggttgtgtctgcggatggtccgctccatgtgactggcggcgtccatgccgaagagttgatcggtatgacggaaaataccgatccgattcgcggcgaacgcgtgattgctgcgattgccatgccaactgccgatgattccggtgatcatgccgcagaacctgctcctcttgcattgggcacgcgtaatggcgtgatcaagcgttggaatcgtgagtcgcccaccacgatggattcatggagcatcatcgatttgaaggatgacgatgaagtgctggctgccgctgaagcgcgcgatgaggatcgactggtgtttgtttctaccgactcgtctttgctgacgtttgatgcgaagaacgtacgccctcagggccgtaccgcgggcggcatggcaggtatccgcttggctgaaggctgctcggttgccgcgtttgcggtgattcccgccaacaaggtggcttggaattacgaggagggagacaatggcctgttctccgcgtctggagccgtggtgttgacggttgccggcgattccgaagcactgccgggcacggagaatggttcagcgaaggtaaccccgttggagatgtacccgacaaagggtcgcggtaccggtggcgtgcgttcgcagcgtttccttaaggggcaggatacgttgatcctcgccttcgtgggcacatatccggtacatgcttccacggagggcggtgccggcgtggaattgccgaagccggatatgcgtcgtgacggttctggtacggaactttccgcgccaatcgccatcgtcggctgacccattgcaatgtgacgtgcccgcgttttgcgaagtttggaatcgtttaggattccgttcgtaggacgcgggcattgttgttcctgcgttttcgtccgcgctgtcactatgcattagcgatgatgatctttttcaacagtaaagtttcatgccttgcggactatcgacgaaacctgcggcgtaaaggatttgccggtattcattgcgtgctttcaatgatgttccgttcatttcgctgaagctgatgctgccgctgggttggcgctgcaatacgtaggcaagttcggcgcatgacggtcttaatattgtttcgtctgcggtgaagctgacaattttatggctttttggtacggagaacagtaccggttcgccttgtttgagcacaatgatggacccggatctgcgtgctggtttgaggtaatcctgttctggccaggcgattgcggaaccagtgagattggcgggatcgatcacgtcgagcgcaacgcaggattgactgtgccattgcgtgtcgctgcgcagcgcgtcgacggtgtctcgttccgcgaattgtgccgcgccaaaacctttcacgaacatgcctcggaccagtgtgccatgttcttccattcgtttgagtaccggatagagcgctgaaaatcctccggcaatccgttccttgtcaaccaaaggagcggcaatcacgccgtatcggtccagtaatgagtcgatgagcgccagctcacgctcctctacacttgccgtatgcgccatgccaatgccggtatcgctgttttcgagcatgcccggctcgataacaccgtctagtggtttgtttggcataacggttcgcccgtcgccacaagatactgcggaccataatccactcagcgccaatggtgttggaggacgcatggtgacgcgtctacgcgcggcacgacggggtgcgcgaacggttttgcctccgtgcagaagcgctcgtactggtgcgaacgaactgttcgtcattttcccctgccataccagtgaccataaggcttcttcgaactgccgctcgccccatgccggaaagatgatttcgcccgtttcggggttcacctgcgcttcggcatgctcaagccagatggtttttgtcacggctgaaagcagttgaataggaaatgctccgccaccgcttaacgccgttaacacggcatccggcatgatcaacgtttcattatcgttcagcttatccaccgccgattcaggctggttgagcagcaaggaacctgctggatagaaggcgatctcaccagcttctttggcgttggatccacttgctttcgaaccgacccacaccacatccgacgatgagatgagttcgtcgagcatactaggctgatagtcacgcacacgtgccgggaataccatggactcccataccgaagcgttcaggaacacgccttccaactgctcgatgacacgcatcagaccatcaacgccttcgtagcgttcacctccaacagggccaacgccctgacgattaagcagaaacgcctgatagacgctcggatcgaccggtttgacggcctttctggccttggcaagagacaatgctcgaatacgccggaaaacatccttgtggagccattgctgaatatcgttcttttcggaagtctcacctgaatcagtgaatcttcccttgatgagttctcctcgggcatccagttcatcaagcgcatgcaccgcctgagccgcgtcaatgcccagttcggcaatcatcttgtcagcggtgaatggtccatgcgttttggcgtatcttgttacgcgcccgctgatatcttcttcggcgagatcattccagaatgttcgcccagcaagctcgccctccacttgtgtaatagcttcggcgtccaacaacgatgccatatccgtgcttcctagaagccgttcgagcacttccagatccatggacagcaactgcgtgcttcgttcggcttggggcacgtcatactggtacatcaccgatccgacgaagccgaacagcatgttctgcgcaaacggagaaggtgtttcagtagttgcctccgataaaagtattgttcccgcatgcaggcctgtcataatcgtgcgtaatgccggcaaatcatatacgtcctgcaggcattcgcgcgcagtttccaacaagagggggaagttcttgcaagtacgagccgcattcaacagttgcgcggccttcaaccgctgctgccagagaggcacacgcttaccgggacgtgtgcgcggcagaaacagtgatctggccgcacattcgcggaatcgagccatgtaaagcacgctttcgccaacttgcgtctcaacagtgcgttgcaattcgtccacgtcgaatagcaacagctcacgtgtaggcaaatcgccgtaaccgtccggcaatcgtaaaacaatgccatcgtcgaccgcgtacacttgaccgtcgaaaccaaaccgctgtttgattcgagtggtgatggctaacgcccaaggctcatgcacgcgcctaccatatggtgaatggatgatgatgcgccaatctccgccttcatcccggcaacgctccaccacgagatcacgatccgaaggaatcgtaccggtcgcttcacattgctcgtcaagcagtttggcaagattgcttatggcattatggtcgagaccatctcgctccaaacgttgcgcggtctcacggttgaactgtgcttccaatacagtctgagccgtattctgatcaccattctttgctggttcacgcctatgcaatccttggctgagctcacgcgtcaaacgcccttgcgccaatccgaaaccataatcacgcccatcctgatccccatgccaaaatggcaagcgcgcggtgcgcccgggagcaggaaccaccactaccctatctcgtgtgatctcctgaatctgccaggtggaagtccccaaagtgttgacatctcccacgcgggattcgtataccatttcctcatcaagctcgcccactcgccgaggacctggaccagagccctcttctggaagcaccaccgcgtacatgccacggtcgggtatggtgccgccactggtcaccgccaagcgttgcgctcctggacgtgcggaaatcagctttgcctcttcgttgtattgcagcggtggacggaatgcggaaaagctctcactgttgtaggcgcccgtcatcatgccgatgacagcgtcgaacatagaccggtcgagattttggaaaggtgcggaacgacgcacaagctcgtaccaatcgttcgtggaaagatcttccatggccgcggctgcgacggtctgctgtgcgagcacgtccagagggttgcggggcatatgcaatggttctatagccccttccctcatgcattccatgctggttgttacgccaataatctgttggcgggttatggggaagaacaacgcgtgcgagactccgccgacattgtggtcggcacggcccactcgctgcaatcccgatgcgatcgacaatggggcggccacctgaaccacgagatccaccgaacccatatcgatgccgagttccaggctggaagtggccaccacgcaacgtaattcgccgcgttttaactgttcttcgatctgtttacgtctatcttttgacacggacccgtgatgagccatggcaatcgcatcaatgtcttcatgcgattcaaccagcatggtggtggatcctaccaccgagtcatagtgcccggcaaattgctcgcggccctccggtgagcccaagtcacggtgctcactcagatcagttgccaccgtgccctgtttcgactccgcatacatgtcgttgagccgtgcggtgagcttctccgccagtccacgcgagttgacaaatatcaatgtggttcggtgccgcaacacctcgtcgagaatggaccgttcaatgaccggccataccgaaccgcctgtagcgctggtgtcgagcatattgcgcaatggttccacggcttttaaatccatggccggaacagcgccggggttcaccaccgttaccggttgcgaaccaccgagaaaccgtgctacttcctcaacgggattaacggttgccgaaagccctatgcgttgcactggatgcccaatcaacttatcaaggcgttcgaggctgacagcgaggtgcgcgccgcgttttgtacctgcgaccgcatgaatctcgtcgacgatcaccgtctccacgctcgtcaatatgctgttcgccttggaggtgagcagcaggaatagtgattccggcgtggtgacgagaatatccggcggatggctgacgattcttcgacgttgttcaggtgtggagtcgccgctgcgcatggccacttcgacatcggggatgggcagctccatcgcctcatactgctgggaaattccctgcaatggcagttcaaggttcttcgccacatcagcgccaagcgccttcagaggcgaaatgtatagcactttgacgccacgcttcgttttcttgcgggagcctttccctgcagctttttgttccgcatggctcttggctgccgcgatttcgccatgaacatccactcctgcggaacgcgtcccgcccgccataagccggtcaagagccgaaaggaacgcacaaagggttttacccgaccctgtgggcgccacaacgagcacgttctcgccggaatggatggccggccacacctgctgctggacttcagtgggccgactgaacgcatgtttgaaccatgccttggtcggctctgaaaacaggttcaaacattcgtacatacgttcgatgatcgcattaccgcaagacgttattcatcttcgtcggcaacccattcgagcacatctcccggttgacaacataacgtctcgcatatggtatcaagcgtggaaaaccgtatcgccttggcccgcccgttcttcaacaccgaaacattgaccggcgttatgcctatagcctccgccagctcattgacgctcatcttccttttggcgagcatcacatcaaggttcacacgaatggccatatcagatcaccgctgccagttcatcacgctgttcgatggcctgcatcaacagcgagcgcatcaccaccatcaacagttcgaacgccgcgatcagtagaagcgccgccactccgaccgccagcacgacgtatggaaacatttgcccgtcaacccccatcgcagccatcagaaagcgtgaaggcgacaaccagatttgaccgaccatcacggcgagcaccagcatgccttcaatccccgcatatacgagaatgtgattcacccaacgcatggccttgccggaaaagacatcacgtttttcaaccaaggtcagcaatctccacagcggcaccaacgcgaactcgaagcaagcgacaatcagcactgcggcaaccgcatacagccaatgcatcgagtcagcgtcggcatacttggaagcaacgccagcggatgccgcaatcgcactgaactgcagtccgaggcagcatattgcaattatcacaatcagcacacgcaatacgccaatcaccatggaacgtttcgctgcggaattcggcatgatatccgtctccttcaatccaataaacctgaatatcgataataatctatcgatattcgatatgcaaatcttgtgaaagtatgttagtcgatatttttctatcgtttttcgatatgtacgatgacgtccaacatatctcagaaaggaatcattatcatgccggaaccagccaacacttccccatcgcagacttcgcaatcccaacaatcatcgccattaccagaagcacaagaaacccaagaaacaccaaaaacacaagggagccagccaacacatgaaccatccgcgcatcaggaggaacaacctttggcgaaacccaaaatcacgcgggaagaaatagcgcaacgccccctcaacaaacgcgcggtcatcaccattggcgctgcatttctcatcactttcgcattcgaccgtctgatctgcagcatacctccgacatggcttatcggatatgaactgccggttttctggatcatctgtgctcttaccgtaaccgcgctgcactggaaaaccgcacgaaaacaagttcttgtttggcttgttttgggaagcatcgtcgccattggcgtgtggaatacactcgctcagtcgacctggtgctattcgagaaatgatgagtacgcgctcaccacgcaattcgttcaaccggcgttgcttatgctgcactgtcagctggtcaacgggcgttacgatgttcgccgtccacttcaagttgcctggaattggcttaccggctggttgcagcagccgtttattcacattcgcgattttgcggaaccgttttccgtcatattcgcaagatttgcagtcgcgtcgaagcaacgttcgaaagcgcgcgaaatcggcattgcgctactgatttccattccattgcttttgacgatcataccgttgcttgtcggcgccgatcaaatagtgcaatatgaggtgttgaacgttttccgtgatttcaatccgatggcgctcattcttcacatcatgttcatcgtattgccgtggccattgctgttctctctgcttatcggtctcaacgccgaacccacttccacaccgccggagcaacgtttctccctcagttcagtaacagcgttcgtggtactggccgtgaccctgatggtgtacgcgctgttctgtgccgtacaagtccggttcctattcgcgggattgctcactgacggttcaatcgcactgccagatggattgacctatagcgaatacgcacgcagcggattctttcaactgttggcagtcacggccattaatgtgaccttgttcggcttggcgatcactctcgcaccacgcacacgcacgctcaacatcacattggtcgcattgctggcgttaacaaccattattctgacttcagcggcacttcgactagggctgtacatcaacgcatacggtttgacttggctacgctacctttcggcatcattcatcgccttgcttgccactgtgatcctgttatgtcttattcgtttgaaaacacaacgactgccattgaccgcgaccgtggccatactgtttatcgtatggtatgtagcgctcggtttcagtagccctaaccgtatatgcgaaatctacaatgctgctcatggcatcgcagacgcagtgacggcaacgccctatcagccgatggtctgaccaccgcactttttacgcaggctctcgtgcatgatcaccatcagcaccaggaaaaccaacatgtacagagggaaccacagcacgctgacatgctgtgcgatcaagccgaataccggcggcatgcacatcgaaccgacgtatgcgcatgccatctgcatgccgacgatcgcctgcgatttgtcttcgccgaaatatgccggcgtggaatgaatgacgcacgggtaaatcggagcgcagccgagaccgatgatcatcagccccacaatagtgccggtattgtgcggcaacggcaacaacatgctaacgataccgattagcacgagcgcctggcccaggcgaatcatagtcggatcgttgaacttcatggtcagaaagccactcgccaggcggcctatggtgatgccgatgcagaacaggctggcccacatggcggctgtggtcttgtcgacgcctttgccgagcgccatgtagctactaccccacagcatggccgtggattccagtgcacagtaacagaagaacatcatcaggatttctttggcaccgcgaatggcaagcacgcctcgtacaccaagcggtttacgagtttcattattggccgtttcaccggattcgctggaagcttcgcctgcgtttgcgccagggcgcttcttccacagtggcagactgaaaataagactggcggtgagcacaacctgcagtatggagatgtaacggtagccccacgaccatccttggccggcgcccaaggcgaatcccatgatgtatgggccagtcaacgcgccaatgccccacatggcgtgaagccagctcatgtgacggctctcgtagtggatcgccacatagttgttgagggccgcgtcaacgccgcccgcacccaagccgtacggaatggcaagcagaatcagcacccaatagttaggagcaacggaaaagccgaacaatgccaacgccgtcaacgccacggaaaccacagtgaccttgcccgcaccaaaacgcaaggtcatacgatcggaaagcaacgcggaaacaatggtgccagcggaaatcgtcatggaaatgccgccagcccacgaaatgggagcacccaaatcgacactcatcgtcggccatgcggcacccaataccgcatccggcaggccaaggctgatgaatgccacataaatcaccgcaagcaaaagattgaccacaccctactccctcttgatcggtagccgcagaaaacaatatccgccattattgtaagcacatatatctaccaatcggtaactacttgattgcactatctaccgtagaatcttcaatctttaccacacggaatcgcataccatcttcactaaaaaataccctccgaaacgtcttgacgtagcggagggcgagctgacgacaacctcgatcaggtatcgatcttcgaacggtcgaaatcgtcggcattctcaacgatgaacgctttacgcggcggcacgtcatcgcccatcagcaggctgaaaatctgactggcctgttcggcgtcttccatacggatacgacgcagcatacgtgtgcgtggatccatagtggtgtcggccagctggtcggcgtccatttcacccagacccttatagcgctgaatgtcctcgttatagctgatgtgcttcttatcaagatcagccaatttgacggccagctcatcatcggaatacgtgtagatatactcccccttgtgagctccggtcaaggcgatgcggtgcagcggaggcacggccgcatacacgtgaccgtactcgatgagcggcctcatgtaacggtagaacaaggtgagcagcagaatgcggatgtgcgcgccatcgacatctgcatcggtcatcataatgaccttgttgtaacgtgcttgctcgatgtcgaagctcgctccggagccagcgccgaccacctgaatgatcgccgcgcattccttgttcgacagcatctgcgacaacgacgccttctgcacgttgagaattttgcctcgaatcggcagcaacgcctggaaaccggaattacgcgcggctttggcggtgccaagtgcggaatcaccctccacgatgaacagttcggccacatcgtcattgcctggctggcaatcagacagtttcggtggcatggatgccgattcgagcgcgttcttgcgtcgcgtcacctctttggttttacgtgcttggatgcgggcgtgcatttcgccgacgatcttttcaagcacgcggccggactgttccttatagccacgtttggagccggtgatcatctcgccgaactgcttgtcggtcattttgctgacgatcggcttgacctgcgcggtgccgagcacatccttggtctgaccttggaactgtggttcggcgatacgcacagtgacgacggcaaccagacctgccagaatatcgtcacgttcgaccttcatgttggaatctttaagattcactttgagcttacgtgcattgtcttcgatggctttgcgaatctgcttggtcaggcccaacagatagccatccacatgggttccaccgcccggggtttccaccacattgacgaagctgcgcatggtggtgtcgtatccgttggtccaccgcatggcgatatcgacggcacaatttctcgtaaccttctgcgcgtgcagttcaccgccatcgccaacggcttgggtttcctcaacataggtgtcttcgccagtgatacgccaaatagcggaaaccgcttcgcctttggacaggtaatccacgaaatccttcacaccgccggtatggcagaattcctcgatacgggcgtgagtatacttcgatccctgaggttgtgccgcaacatcggtttcctcgatctgctccgcagcttcctcgtgctcggcagcgtcatgttcagattcatcgctttcggcaatttcctgcggttcatcacctgcagcatttgcaatatcgtcgacttccagcatttcgtcgactgattcatcgccggtttccggaatattctcatcgataacagtgattttcaaacccggcaccaggaagctggtctgcctgacgcgatcaatcagctgctcgtagctgaattccgcggtgtcgttgaaaatctccggatcagcccaataacgaatgcgagttcccgtggtcttcggactgaccttgccaatgatttcaagctcagtcggacggtttttacgcgtgcgtttgaatggcgcatccggagatgggtgctccggatcagcatcggtatacacaccaggatgaccctgatggaatgacatatgatgcgtcttaccgtcacgatccacttccacgtcaagacgggagctcaacgcgttcaccactgacgagcccacgccatgcagaccgcccgaagctccgtacgaagagttaccgaatttcgcaccggcatgcaatttggtcaacaccacttccacaccggtaagtttggttttcggctcgatgtcaacagggataccgcggccgttatcggccacttccacggaaccgtcgctgtgcaacgtcacaacgatacggttgcagactcccgcaagagcctcatcgacggaattatcgatgatctcccacaggcagtgcatcagaccttggctatcggtggtgccgatatacatgcccgggcgtttacgcaccgcgtcaagaccttcaagcacggtaagactacctgcgccgtaattgtccttgtctttcgccattttcctcattctgacttgcagttttgcttcggttttcatccataagaacgtcttgtagacgtaagaagccgagaaactcgatattcttaccgaatttctcgacttcattcacctcttgtttcaatcactgatcaaggaagtcacgcagcgtctgcgagcgagacgggtgacgcaacttcgacatggtcttcgactcgatctggcgaatacgctcacgggtaacgccatacacgcggccaatgtcgtcgagcgtcttgggctggccatcttccaggccataacgcatcttgatcacgccagcctcacgcggagacaatgtttcaagcacctgcctgaactgctcctgcaacagcgagaaggcaaccgcgtcggacggcgcgatggcgtcggtgtcttcgatcagatcgccgaactcggaatcgccatcctcacccaacggcgtatgcaaggaaatcggctcacggccgtacttctgaacttcctgcaccttctcgacaggcatgtcgagctcgcgtgcaagctcatccggcgtgggttcgcggccaagatcctgcagcatctgacgctgcacacgagacagcttgttgatcacttcgaccatgtgcaccggcacgcgaatggtacgcgcctggtcagccatggctcgggtgatggcctgacgaatccaccacgtggcataggtggagaacttaaagcccttcttccagtcgaacttctcgacggcgcgaatcaaaccgaggttgccttcctgaatcaaatccaagaacagcatgccacggccggtgtaacgcttagccaacgaaaccacaagtcgcagattggcttccagcaggtggtccttggcacgcctgccatcgttcgcagcccacttgagctcacgcttgcgcttgaagtccatctggtcggattcggtgtccagcaggtgctgggcatacaggccggcttcgatacgctcggacagatcgacttcctgttccgcattcagcaggctcacacgaccgatctgcttcaggtaatccttgaccggatcagcagtcgcacccgccgcaatcacacgacgcttcggattgccggatggggtcagattctcatcatcatcgtcatcacgcaccacgaaagcgcccttttccttaggctcttccggctttttgcgttcttcctcatcctcgtcgtcatcatcttcaggttcggattcctcgtcgtcgtcgaggtcatcctcgtcatccgaatcgacgtcatcgagatcggcgtcgaaatcgtcaagatcggcgtcgtctacctgagcgtcctcatcgtcaagtgcatcatcctcgagcggctcctccttcttggcaggggcgctcttcttcgcggtagtcttgcgaggggtcttcgttgcggtggttttcttcgccgcactcttcttcgtggaggccttgcgcgtggcggctttcttcgtggaggtggtcttttcggtcagatcagcctgttccatgcttgccgtcgtttccttggtggccaaacttatcctcctattgatcctgcctcgaagcgtataccatatggacccacttctggcaagggcaaatcgtcaactatgtgagtaaaccatcttgcaaggacgattattcccgcataatgaggccttcacgcgcaagtcacgccactttacggcgtgttgccttatgtttccgaagtccaggcaggaccaatacgtcgttcaaccgccgagcatacaatcgccgccagcgaacattgatcatctatcgcgagcgcgctgatggctgatgccatggctccttcctggcccatccaccacatgatgtagctgatcacggcgaacggctgcgcccgatatgtcttcggaatcatatcgataatgtcgaacagcatgttgatcgcctgatcgcaacgtttcatatcgggtctggctaggggatcacggaatgaatcgctgagcagctgttccagacgctgcgcattacgagacagcttgggtctttcggcgaaactcatgagaaagtctcggtcggcatatcgttcgtcaacgatggcggaaatgagaaatacgtcacgaatggacagcatccgattgatgcccaccgtagttcgcatgatcatattccggtcaagaccgcattcggcatggaatttgccttccgaatgggaaacgctctcgtccgacgcctgcgcaagcgcgtccatccatatgaaaagcggttcacgaatgaacgaacgcactgtttcgcccacgccgtcggatctgcaatccctttcgaatcggctgatggcttcttccatttcagtcccggtgatgcgtccggttttgttggttgtcattattctgccctccttggcatggtctatcggcttcctcgctcgccgcttatatggcactatgcccgatgagccgatgcgatgccgcttttttcgaggcctgtggtcggaggatggcttcttcggcgtttcgcaaaatgatttcggtaccgcaactattgcaatcattgagatttggtcttgtcgaatgcctgtggataactgttggtatgactagctcctccgatttggaacagattgaatcacgcattgtttcgttggtgaaggatttcgcattccttcatgcggacgattcggttgccccctcttgcaggcctattgccgacatggtcgccaagcaggcggtcacgtcaagtgagggtggcaagcggcttcgctccttgctgacgttggattcgttccgcgcattcgcttcggaggatgtgcgagaacgtgatttcgacgcgctgctcgatttagcgtgcgcggtggaagtgttccagaccggtgcgctggtgcatgatgacatcatcgatgattccgatctgcgccgtggcaagccgtctgcgcatcgcgcattctccactggtacgcatagcgaggccattggccatggcttgggcatcatgctcggcgacatgttggccacggcaagcgtggacatcgcggacaaggcagcttccaagctcactcatggttccgatgtggtcgcggcattgctcaacatgcaccgcgaggtcgaagtcggtcaagtacttgatttggccgtagagctcaatccgttggacgatccagacgaactggtggaagcttcattgaacgtattccgctggaaaaccgccagctacaccaccattgccccactggaattcggcatgcttgccgcgggtataggcaaagacgatgcgaggaagcaggcattggcagtcggcttgcctcttggattggctttccagcttgcagacgatcttctggatgttgtcggttcgagcagcaatacgggcaagcccgttggaggagatatccgcgaaggcaagcgcacggtgcttctagccgacgccatcaacgcggcgaacgacacgcagcggcgagagctcatcgacatgtgggaggccgattcgcgttccgaaactcaagtaaaacgcgccattgaactatttgagcaaacaggagccatcgaacgttcccgcggtagaatcgcggatttgtggaatgaatcgaaaacagctatcgaaacattgagcctttccgaataccacgagtcactgctcatcgaggcctgctcacgtttcgtgccaagtattcacgtccaaacacgcgcgtgacacgcgacctgcgtgttttccaaccaacatccggacaggacgcgcgttcgttgcacaatccgcaaacctctgcttgtagactacaagtgggaacacgttcgaacgtgagttgttttgaagaaggaaccgtagcgatcaaccatgagtgaagctccacacgcccctgaaggtcaggtcatcgagggccggtatcgggtcgtcagcagaatcgccgatggcggcatggccacggtgtaccaagcggtagacgaacgtctggagcgcacggtcgccatcaaaatcatgcatacccagctggcgcagggaccgcaccgggaccagttcgtggaacgattccatcgtgaagcccgttcggccgcggccattgccaatccgcatatcgtgcaggtgtatgacaccggcgaattcgacggtctcgattatctcgtcatggagtatgttcacggcgtgaacctgcgttacgaaatgaaccagcagggtacgttcagcgttcgagagacgttacgcattattggcgagacattggatggcctcgcttccgcacatcgtgcgggcgtggtgcatcgcgacatcaagccggaaaacatcttgcttaacgaccgtggccatgtgcagatcaccgatttcggcttggctaaaacggtatcgcaggccacactctcctccaccggcatactgctgggaacagcagcatatctagcaccggaaatgattgagaagaatcaagccacacctcagggggatttgtattccgtgggcatcatggcttgggagatgctcgccggcaacgtgccattcacttcagataatccagtaacactggtattcaagcatgttcacgaggatgtgccaagcattgccgccgcttgcaaaggcatcaatgaaggcgtggccgcattccttgcccatctcacggctcgcgcggtcgaggctcgtccagcagacgcatccgttgcgttaaccgagctgcagcgtctgcaatcgacgcttgcggtcagcgattggcagtatcgtcttcccccggtagacgtcagcgcttccgacggtgccgcgcccgcaaataacggtgcgccaaccaatgtcggcaatcctgttcctcccgctcccccggcaccgccgacgcagcaattcgatgatcgcacacgcaagctggacagggtcaggacgaacgcaacaaccgtcatgccggtgcagcaacagaacatcgatccagaagcgacgacacgtttctcgctgccggcagacggcatcgtcaatagccttgacaatgccgtcgacagcgctgcatcgcaatcccccatcgcgcaaagcgacgaatccggcaatactccaaacagcaaatccgcgaaaaagcgtcgcacaccgctcatcgtcgcaggcgtggtggcgctgctgcttgcatgtggcgccggcggttgggcatggtggtactatcagggccccggcagctattggaccatgccccagccggatggtatgacatgcgacgcgtccgcagcatgccccatcaccaatgtgaagtggagcgactacgagagtctgctcaagatttccgatatcgaatatgaggtgtcggaagagtatagcgattccgtggaggaaggcaatatcatctccaccgacccggcgaatgtcggcgatcgcggcagcaagcgtcgtagccagaaagtcaaggtcgtggtctccaagggagtccggcaggcgacggttcccgccgatattctcgacgcgaccagcgcatccggcaaggatccaatcaacgcgctgaagaaggctggattcgataatgtcgagcagaccgcggcttctgatgacacgtattccattgacgtgcctcaaggggcgttgctgtcgttaagtgtggatcccggcgccacattgccgcataatacgacgatcaccgtcacggtgtcgcaggggccaaagccagtcactatgcccgatatcgtcggcaagacgaaggacgaggcacagcaggcgctggatgatcttagactcaccaccaattggacggaatccttcgacgacaagattccacaggggcaggtgatttccgcttccgtcaacaacggtgatacgttgcattggggagacagcgtcgacgtggtggtttccaaaggaccggaaaccataaccctgccgaattatgtggggcagaaagcctctgacgccaaagccgcattggaaaaactcggattcacggtcaaggtaagttcgcagctcacgttggattccaatcaagacaagaaggtcgcttcgcaggatccggtaggtggcaccgaagtgcgtcttcgcgacgagaacggcataccaaccaccatcacattgaagatgtattcctcactgttctaaaaaatgcattacctgctttgccaaaacatcatggtataggcataaggaaagccccggctcgtgtagtgtcgtgccggggcttttctctttggtttctcagctgttcgcctgttcggcggctttctgagccttaagctgttccttgactttctgagcgtattcgttcacgtattcctgaccgctcatcttctgaatttccatggtcacgcgatcagtcagcgtgcgcaaatcgtcgtgcgtgatctggtcggcgggcttcttctccacggcaatcggttcgccgtagatcactgtggtcttgcccttaccaggaataatctgaccgggcttctgcaactcgcgagatccgataatggcggacggaacgattgggcatccggtttcaaaagcaagtcgcgcagctccggtatgacctttatagaggcgaccgtcagggctacgcgtgccctcaatatgaatgccgaacaggtggccgtcttcgaggatttcacgcgcgtggttcaatgcgccaagcgatttcgacccaccggaacgatccacggggaacacgccaaccgaagtgaaccaccacttcttgaacttgcctttgatgcccttgccttcgaaatactcggctttgcccatgaaatgaatcatgcgcggacaagtcagcggcaacagcgcgtcatcgatgacggcaagatgattggctgcgataatggcaccgccttcgcgcggaatgttttcaagtcccttggcagtcggtcccatgcggtggatggcgatcggtcctaggcctttgacgaaaaaccagtagagcatttttcacgatcctcctagcggatggccatccgcttgattacagttatcagtatgactgacctcaacaatagcaatgccgatgaagaacgcccaaatgccgcgccgaatggtggcgaaggggcttcttcaaatgcggacgatttggatgccgcatgggctgaattcgcaagttcgcatgccgacgatttgcaggccgtggagcattctcgtagcgcgaaacgttttgaaaagcatgcgcagcgccgtgagaaggaggcgttgctttcgattcaggatttggatcagggcacgttcactgatgacactccgcaaggtcgtggaccgcgcgatttcactggttccagctggttggacaccgatagtgtaatggatcgttacggtgatgatttcactcctccgaatccctccatcggtcatgtcaagatatcgaagttggtgttttgggtgcttttgatcgctggtgtcgccggtatcatcgcatctgcattcatgcctgctttggctgggattttgggatcgattttcggtgtgtgcacgttgattggcgctgctggattgatcgtacagcacaagggacatacacaaacccgccgcgatgttttcgatgatggagctcgcgtatagcaacatatggagaagactgcatcagctacgtcttttgtgctcttctctgtgatatttgtcgctgcgatacgtataaggcgtgtctcgtcgttgagtgttttgacgagacacgccttatacgttcttatgatctgctatttcgccgaatatcaagctttcttggactgggcggcggtgatccactggtcaagcagtgccgaggccttgcctgaatcaacggtttcttcggcaatggcataggccgctttgaatcgttcagtcaggctggcatcagctggcacctgatggccgtccgcaacaatcgcggatgccgcgttgagcagggcggtagtgcggaaaggaacgtccttgcctgcaaggaagtcacggaacagctgagcgttgagctccggctctccaccctttaagtcagccaccgtcaccttgtcgagaccaagctccacagtcggatcgaattcactctcagtgactttgccgttgctgaactcccagatggacaccggaccagtcggagccatttcgtcaagtccctcgcttgacgtgtacaccatgccggtctgtccattagccgcatataccgcagccatgatcgggctcattgcgcgattggcacagcccaccgccatgtgcttcggcgaggccggattggtcagaggtccaagaacgttgaatacgcatggcatgccgagcgccgcacggacaggtcccacgaagcgcattgccggatggaatgtgcgtgcgaaagcgaatgcgatgccgcattcgttgccgacctcagcaacctgttccggttccagatcgagcggcagtcccagcgcctcgaagcaatcggcagtgccgcacttggaagaggctgcacgattgccgtgcttcacgactttcgctccggctgcggcagccaccaccgcgcccatggaagacagattcaccgtcgcggcgccgtctccaccggtaccgacgatatcggtggtctcaccgtcgatatcaagtttgatggcatgggagaccatggccttggccgctccacgcacctcatccggagtcaagccaagctgctgctgggttgccagaaccgcaccgacggccgccggattagcgttgccgttcatgaggtcatcgacgaaccactcggattcctcggcactcagatggtcccctccgaccagcttggtgaggatcgacttccatgtgatttcagccatgatgccctccttgacgcttcagcatgtcacgttgttgatacgatatcgccgccattgtaaccgttctacatttcatggtttttcaacgtccatatcacgaacaggtaattgcagaaaagcgctcatcataaacaacacagacattttcaatatctatcttccgcatatcgggcaacgagcatgaaacaaaaaggcggtctgcgaaaaatccgcaaaccgccttcattatgcgcgaatcatcagagcatcacacgatatgtcactgttcgttctgtccgtggcacatcttgtacttacgaccggaaccgcacgggcactgggcgttcttgccagttcccgggaaggtgcggccatccgcccacggagagcgcaattcctcgctcttcgggcgcttattggcaggaaccttgccctcagcatggctgatcggctgcatgcctacgatgccaggctcattcttctgttcttcggccagttcgtcgatgacggtcttctcggcctcatcgtcggtttccggctcggcaggagcggtttcaccggtcggctgcgcttcgctatccaggcccatcaccgcttcggctgcgttcacggcctcttcctcatcggattcgggttcggcgtcttcggtggtggcgacacgatcgatgtcaacgtggaacagcagctggatggtctcctccttgattgcttcaatcatggagttgtacatctgatagccttcgcgctggtattcgaccagcggatcgcgctgacccataccacgcagaccgatgccgtccttgagataatccatctcatacaggtgttcgcgccacttgcggtcaagaaccgcgagcacgacacgacgttccagctgacgcagaccctcttcaccaagcttggcttcgaagtcggcatactggtcctttgcgtcggaaacgataagctcctgcagggctacgatggccttgtctcccttgagcttggagacagcgtccttggcggcttccggatcgacggcaatcgggtacacggcgttcagagccttgaacaggccttcccaatcccaatccttcggcttgtcagaacccttgttggcgcccttgatgtagctcaataccgtatcgtcgatgaacttgaggatatcctcgtggatgtcttcgcccttgagcacagcctgacgctcggcgtagatgacggtgcgctgcttgttcatcacgtcatcgtacttgagcacgttcttacggatttcgaagttgcgggattccacggccttctgtgcggtgcgcacgcccttggaaacgctcttcgcttcgatcggctcgccttccggcatgcccttggccataacgcgggccacgagctgggtgttgaacagacgcatcagatcgtcttcgagcgacaggtagaaacgggactcgcccggatcgccctgacgtccggaacggccgcgcagctggttgtcgatacgacgggattcgtgacgctcggtaccaagcacgtacaggccgccgagttcaacgacctcttcatgctcgtccttgacctgctccttgatttcggccaaggtgcccggccaacgcttctcgtactcgtccggagtgtcatccggagaatagccttcggacttgagcttcgcatcggcaaggaactcgacgttgccgccgagcatgatatcggtaccacggcctgccatgttggtagccacggtgacggcgcccttacggcccgcgacggccacgacggcggcttccttgtcatgctgcttcgcgttcagcacctggtggggaatgttggcaacgtcaagcagggacgacacgatttcggaggattccacggaagcggtacccagcagcaccggctggcccttcttgtggcgcttggcaacatcgcgcacgatggcggcaagcttctccttcttggtacggaagatcaaatcgtccttgtcttcgcgaatcatcggcttgttggtcggaatcgggagcacgcccagcttataggtgcccatgaactccgcggcctcggtttctgcggtaccggtcatgcccgacagcttgtcgtacatgcggaagtagttctgcagggtgatggtggcgaaggtctggttctcagccttgacttccacgttttccttggcttcgattgcctggtgcagaccttcgttgtaacggcgtcccggcaggatacggccggtgtgttcgtcgacgatgagcacttcaccgccagtcaccacgtagtcgcggtcgcgcaggaacagttccttggccttgatggcgttgttcaggtagccgatcagtgcggtgttgttcggctcgtacaggttgtcgatgccgagataatcctcgatcttgttgatgcctggatcgagaatgccgacgaccttctttttctcgtcgacctcatagtcctcgtcacgggtgagcttgagcaccagacgtgcgaactgacggtaccaacgggtcacgtcgccttcggccggaccggagatgatcaacggggtacgggcctcgtcgatgaggatggagtcgacctcatcgacgatggcgaagtggtggccgcgctgcaccagatcggacttttcccacgccatgttgtcacgcaggtagtcgaagccgaactcgttgttggtgccgtaggtgatgtcggcgttgtactgcttgcggcgctccggcggtttctggttggtgatgatgcagccggtgctcatgccgaggaagcggtagacacgacccatcagctcggcctggtagcttgccaggtagtcgttgacggtgacgacgtgcacgccctggccgtcgagtgcgttcaagtatgccggcagggtcgccacaagggtcttgccttcaccggtcttcatttcggcgatgttgccccagtgcagcgccgcgccacccatgagctgcacgtcgaagtggcgcaggcccaaggtgcgcttggatgcctcgcgcacggtggcgaaggcttccggcatgagcttgtcgagggattcgccattgtcgagacgctgcttgaacttggcggtctgacccttgagctcttcgtcgttgagcgctgcaatctcatcttccagcgcgtcggtcgcttgagctacgtgctcaagcttcttgatctgtcggccttcgcccattcgcagggctttgtcaacgatatctaccacaatcactccctttgtgtatgcgagttatctcatctgagattagtcgctgtttaacgatttccgaaaaacaccgtccattttacgcaactttcagcttgttgcggccttcttccattcgacacaccgccttcagacatgaaaaagaggcccgcacatacactgcgcgagccccgttcggtcagattatctccctatccaacctgttgcatgccttacttcgccacattctccggggtgtcgatctcgaagacgccatagctccagccgtgacgatggtagacgacggacggacgaccggtctccttgttcacgaacaggaagaagtcatgtccaatcagctccatctcatacagcgcctcatcgatggtcatcggctccgcgatatgcagcttgcgacggatgacaatcggagtgtcgcctacttggacttcgacggactctcccggacccagctcagcggcgacggcttcggccgggctgttattcggcacttcgaccggctcctcaacttctggagtcggctcgacgacaccaagatcgaccgggaccggatcgctgtagccacgacgatgatccttgcgacgatcacgggtgcgacgcagacggagggtcagcttgtcgagcgccatgtccagagcgctgaattcgtcggcgctggaagcctcggcgcgcaccacggtacgacctgcgatgacggtgatttcaacgcgcttggcggtgtcggcctgacgcggattgccctcgtgcgacaacacaatctgaacacgctgcgcatccggggcgatagcggtcacacgattcatcttgctttcgacaacgtcacggaacctttgcttaatctgcgtatgacgtccggtaacgacgatttccatgtggacctccctagactcaagcggtgttacccgctatatacggaccaaacagctgcttcgctgttcggtagtcaacattgtagccgcaacattgtgatttcactgaaaagttgacgcaagaaaaataaagtttttttgattttcctttcgtccgttttcttgctatcatagtgcatttgagacctcttgatggccgcgaccgatccgtcggttgaggaacttccgggctccatagagcacgatggcggataacgtccgcccagggcgacctgagagatagcgcagcagagaacagaccgcttatcggtttcgaccggtaggtaagggtgaaacggcggtgtaagagaccaccgggccactggtaacagtcggccgcatggcaagcctcatcgggagcaaggccaagcagaaggcgtttgagggctgctcgcccgaagccttcgggtaggctgctagagcctggcggcaacgtcaggtcgagatggatggccatccgtgcctgaggcacgacagaacccggggtataagaggtctcactcccttatcacaccgaccgatccccgtggcgaaacagtgtttgaaaaccgcatagccactatgcgaatcagccgtttcagacgaacaattcctgtgcgatttcccgcagaacttcaggattatggcctttccgcccaccagcactccagaatcgtcttttacgcacctcgacatccaatccagcagtttttctcgccgtccgacgtcccagctcccatgcagcctcggcgaacacgccttgggattcggcctcatcgcacacacgttgtgcaagctggcggtccacacctttgcgtttgagctccataaccgctcccctataccccatcagtcgtgatgcgcagtaccgcaccgcggactgggcgtacgcctcgtcgtcgatgagacggacccgaatcagtctgacgatcacatcgtccaccacctcggaggcataccccttgccgatgagtcgctcccgcatcgcgcctgacggacgcggcgccgcatcaagcagccgaagggccgcctccctgcatgcatccaaatcattcgaatcgtcaggaatccgcgacacgccgactgcgacacgccctgcgtgtcgtgcgtgtcgcgcacgcctcggcgtgtcattgccgccaatggacggagttcggtcgtaatcgaattcggttcgaccggcctgcggccgaccaccgcaggaaagggcaaggcccccagcctcggatgataccggctggaggccctgctgttcaagaaatcgctcagcgctgatcatacgtcacgccttgccggctgacttggaagcctttgccgcgcctttggctgcttccggcttgccagcatccgctttcgccttctcctcgcttgtggcattagacgcaaaagcctcattaccatcttcggcaaattggtcggtgggctcaatgagaccaaactcggccttcaccttattctcgatctcttcggtaagctccggattgtctttcaagaattggcgcacgttctcacggccttgacccaattggtcgccaccataggtgaaccatgatccggacttcttcacgacattgacctgcaacgccatgtcaagtacggaaccttccttggaaatgccctcgccgtacaacacgtcgaattcagcggtcttgaacggcggagccatcttgttcttgacgaccttgaccttggtgcgattacctacagcctcatcaccattcttgatggtctggatacgtcgaatatccatgcggacggacgagtagaacttcaacgccttgccgccggtggtcgtttccggattgccgaagaacacaccgatcttctctcgaagctggttgatgaaaatggcggtggtgcccgcctgagccaaagcgccagtcatcttacgcaatgcctggctcatcagtcttgcctgcaaaccgacatgactgtcgcccatttcaccttcgatttcggccttcggcaccagtgcagccacggaatcgatgacgatcacgtcaagcgcaccagaacgaatcagcatatccgcgatttccagcgcctgctcgccgttatcaggttgggaaacaatcaacgaatcagtatcgacgccgagcttgcgcgcatagaccgggtcaagcgcatgttccgcatcgatgaacgcggcgacgccaccgtttttctgggcattggccaccacatgcaacgccagtgtggtcttgccggaggattccggaccataaatctccacgatacggcccttcggcaggccgccgatacccaatgccatatccaatgccagcgatccagtaggaatcacctcgacatcctgctcgggacgatcgcccaatcgcatggccgatcccttgccgaaactcttctcgacctgtgcgagcgccgtatcaagcgcagcctgacgacgcgggtcgatgccgttcgcggacttgttctgtgcggctccctttgccgcgctcgtctgtgccatgactactccttttgctgactatgacgaatggtggcttcaccgtaaggccacggcattcgttcccgcaaatctaacggccgttgtggtcggaggatatgcgatccaacgagtcataaccaacatttcttggaaaatcaacgttttcacgcgatctgaagaatttggaaacagcccgtctaggttgttgtctgtggataactatatcccaacatgcgaacatctgttcgaagaggcgtgttgtgtccggaaaacgtctcagcgcaccggcataggaggcgcgttatggtccttgccccaacgctgggaatcgggaatgcccatctggtcgcataatacattccagaccactcgcggctcctcaccagcgccaagcgcgtccaccgccgtcatgccgccaagacgatcaagcacctggtcatgcgccagcgctcgaccatagctacgaccaagcacctcttcaagtaactgccaaaattcacgttcctgcacgtgccccagtgtacacagacttgaatccatgtacaggcacgaaaaacgcccggcgaacaatcgccgggcgtcaaccttacgttcgaatcaggcagccacagaatcgagatagtcagccaccatgcgaagcatctgggctgtggacagccccaaggactgcgcgatggacgacagcagttcggaactggcctccttctggccgcgctccacttcggaaagataccccaaagacaccccggccttttcgctgacctcgcgaagcgtcttatgatctcgcgtgcgcaggtcgcgcagcacatgacctatggcttcacgcagcgaaacctccttagcctcatcgggctgttcctgagcgtgcggcacagcatgcgtgcgtacccgatcggagtcctcttcctgccacattcgtgtcaatgcggcctgacgctcatccttggcctttttcgcagcgcgcgcacgaagcacctgctgctgcgcgaacatcacagcgcgccgctgagccggcgtaagctccctgacacgagctccggcagcctgcgtagtcgcaggggccatagccttgagttccctctgttctttggtgagtgtcatcatttccattcatcagcccctttttcgtgcgtacgtctgtccactatggtcaacactcatctttgtggattattcctgtgaatccactgaaagctccctcagtttttgcagaatacaatgcacgacaccgcgtcgcacgctctccctatctccctgcaggcgaagctcaaaagcctccgttcgccgagagcgaacacctccgaacccctccggcagggaacaaccgacatatgcaagacctgccggtttatttccatcaggtccaggccccgccactcccgtggtcgacaatccaataacgcagtcgccatccccctgctgccgatacagcctcgccgttccggcagccatctggcgggccacttcaggatggacagccccctcgctgcgcagcagttccgcatctacgccaagaatcgaggccttggcacgaatgtcatacgtcaccgcggaaccgagaaaaaccttcgacgctcccggcacgcgcacgaaagcgtcggccaacaggcctcccgtcaacgattcggcggctgcgatcttgaaatggttggcttcgcaatatgcaagaacggccgcagccaattcatcgcattgcgattggttggcggcagccgtctggtccatagattcagtcatgaatgccttacttggtttcttttccggacttgcccgcggacttcttacggccgccgaacgtattgaccagatactcgccaccggaatacaggcacaggatcaacgcaagatagatcagcgcgtaagtaatggtgtagtagacggtcatccacatcggggtgtcgttgagtccttccggagccagactccacatgggcagcatgagcatggccaagccgatgcactggcagagcgtcttgtatttgcccgcctgggatgcggcgatgactttgccgcccgtatcgatcacaaagaaacgcatgacggtgatgccgatctcacggatcaggaacagggcggtcacgacccagcccagcaccggattgccgaattcgttgaagatggcggcgacaatcagcgtgccacaggtgagcagcttgtcggcgatcggatccatcagcttgcccaattcggtgacctggttgtatttgcgggccatccaaccgtcgagtttatcggtgcatgccgcgacgatgaagatgattgctgcgacccagcgcatggtgacgttgtccaagccccacgcaccggctttggcgtacagcaccagaaacacgatcaccaggatgatacgagagaaggtgacaaggttcggcggcgcgttccagccgtcaagcaacgatgatttgcgttcttcttgcttttccatatcgttcacgttaccccgacacttctacttgcttatctatttgcgtttcacacggagcgttcccgagtcacatcgccgctccggagtccgctgccgaagagactcccgaactcagcgacgacgcctcgcccttgatgaaggcaagcacctgcggcaggtcttggggttgtaccagcacctcacgggccttggacccttcggaaggccccacgacgccacgtgactccagcagatccataaggcggccagccttggcgaatccgacacgcagtttgcgctgcaacatggacgtggaaccgaactgcgaggtgacgaccagttccgccgcctgcagaagcacatctatatcgccgccgatgtcttcgtccggctcaatggccttcttgtcggcttccttggccatttcttcgatatcctcacggtaatgtggcttgcgctgggtacgtacgaattccacggcacgtcggatctccgactcgtcgacccatgcgccctgcacacgcaacggtttggcttgtcccatcggcaggaacagcgcatcgccctgtccaatcagagtttccgcgccagtggagtcgagaatgactcgagaatcagtggccgacgaggtcgcgaacgccaaacgcgaaggaatgttcgccttgatcaggccggtgaccacatcgaccgatggacgctgggtggcgagcaccagatgcacgcctgcagctcgtgccagctgcgtgatgcgttggatggagctttccacatcattcttggccaccatcatcagatcggccatctcgtcgacgaccaccagaatgtacggatacggagcgaccttgcgcttcgatccggccggggcatgcaccttgccggcgcgcacggcagcattgaagtccttgatatggcggaatccgaagaattcaagatcgctgtaacgagcatccatctccttgaccacccattcgagcgcctgcgcagccttcttcggatcggtgatgatcggcgtgagcagatgtggaatacccgcgtatgccgatagttccactcgcttcggatcgaccatgatcatgcgcacctgatccggcgttgccctcatgatcacggatgtcagcatggagttgatgaagctggacttaccggaaccggtggcgcctgccaccagaagatgcggcatcttggtgaggtccgccgttacaaaatggccttccacatccttgcccacgcctgtgagcatcggattcggatcgtttcttgccttgtccgaacgaagcacatcgccgagcaccacggtttcacggtcggtgtttggtatttcaatgccgatggcggacttgccttcgatcaccgacaggatgcgcacgtcggaactggccaccgcgtaggcaatgttcttctgcagattggtgaccttctccactttcacacccggaccaagctccacctcatacatggtcacggatgggcctcgcagaaagccgatgactttagcgtcgacattgaactgctggaatgtgaccgtaagagcgcggatcacacgatcgttctccggagtgtgcacggcatgcggcgcgccttgcttcagcatgccgagatcaggcagatggtaggggccctccggaatctcaccggactcgtcggaaacgccctctccgttcgatccggcatccagatcgttcacgacctcattggtcgccgcatcgaccatgacctgcgacccgttggacgtgccgtcctcgtcgatgacggcccacgggtcccctacagccacgccaacggatttgatctcgttggacgccgcctggccggcaaccgtcggaatggtttccgggatctgcggcatggtgccgctcgccaaaccgattgggtcagaggaaagggaacgcaccacaggcgtctgcggcatggcgacggttccaccgaaatcctgagcggaatgttcgccggatgaaatgctgcgcggccgcgagacgctctgatatggttcgtcaagcatggtttccgccgtttcgccatgccgttcggcagcgttacgaaacgcctcatcaccgtcgtaatgatcgagtccgtcctgagcgccctgcttcttggatttcgatgatatccattgctttatgagggagaacggcatcggcttcttcttttcagccgccacatcgtcggctccattatgcgccggcacgccttctgcgaacgacagcgtggtatctcctatacgcacttcgttcgggaattgcttggtctcgtcatcaacctttttatttgcaccgaatccaaaacggaccttcaatgcacgtactttgtcgggaatctcttgaacccctgtattggtaatcagcaacaacgagaacaaaatgacgaccacgaaaataacgatggcgaacgccttggaaagcccccatgccagcgggcagccaagcacatagccgagcagacctcccgcattctgcagcaacgccatgtcgaaaccttgggcgtcggacgcgagcgccgcatcgagtatggagcagacggaccacagaatcatggaccaccccgccaccatacgcacattgccgcttttgcgcttggtctcatatatgaggctgaatgccaccagcgccaaaaagaccggcaggatgacgctcatcagaccaaacaggccggaagccaaggcgtggagcatccggccgaacacgccctgcacccggaaccattccgaagcgcagaacattaccgcgagaatcaccagaataaaacatgcgatatcacgtccgtacttggtcaaaacacccatcacaggcgacggctcgaccgcgtccatgaccttggtctcgccggaacgcgccttgcccgtggaccctttgccgccggatttcgtattggaagatgctgttcgtgccataacggtcatgattttacccattggaggcgccatgacatggcacttcctcgaatcgcacacattttctaacttaagtgaacacgcaatttcactgattggattccgtcaagatcgtcaccgtcaatctggaagccaagccggagaagaccgtggataaggtggaaagcttcgacgaatatgacagcgggagtttcatttcaggcgaggtctccgagatgatgctgggtgtaggcgtccgcctgcgcgtctatggcgtcataggcgccggcgtcggcatgttcgatgatggccatcgcattgtctagcagcgccggattgagcgcctgaagccaatggatgcgcgggtcacgaccgaaccatcccatctgtttgcgcgccagacgcttcgttttctgcgcaatgtccatgaacgtgtcgttcaagtcgcggagtccgtccaagtagtcgacgacctgctggtaaccgagcgctttggccgcggtgatgcccagcttgggacggatgcgctccacttcttcgatgaatccgccttcgagcatctgcttggtgcgaatatcgatacgacggtccagttcctcacgcggcagatcgagaccgatttgcacggtggggatgacgtaccggtagtgcggaaggcttgccgaatagggtctccccgtcacttcgataacttccagcgcgcggatggttcgtctcggattatgcggatccatgcgcgccgccgcttcgggatccttggccttcagctcgtcgaacagcgcgcccgcaccttcggctttctcccgttcctcaagcgccttgcgtactcgcgggtcggtgccggggaaggaaatgtcgtcgatggccgcccgtgcgtacaggccagagcctccgacgagaatcggacgcactcccctggcctgtagttcggctattttctcgcgggcgagctcttggaaccgcgccacggacatggcatcgtccggttcgatgatatcgatgagatgatgcctgacctgcgcctgctcctccgggctcgctttggccgtaccgatatccatgccccgatacatctggtatgcgtcggcgttgatgatttccgcctgttcgcctttgcgcgccaacgctttggcgacggcaatgcccaacccggttttgccggatgcggttggaccgacaatggatacgaccttacgctgcaaggcaggatcggcatcccctgttttgcctgttgtttcagaagtctgttcagtgtcgaacggcataggtctgccccgccttcaaatcgggatcggcgatgagattgtggcgccccgcatgggtgatggtggcggtcacgaaatcgcctacctgcggcatcggctcgccttcgggcacaccgacatgcacgagcacgccggttttctcgcgcccggtgacacgatgggtcgcggcgtccttcttgccggatgcgccggtgaccatcacttcgacatcacggccttcgaaggttttgagattttcttcggtgattcgttcctgcaatgccacgagtcgttcgaaccggtcttgggccacgtcgtgcggcacctgctccatttcggcggccggagtgcctgggcgcggcgaatagatgaaggtgaatgcggacgcgaatctcgcctcttccaccacgcgcaaggtttcctggaagtcctcttcggtttcacccgggaaaccgacgatgatgtcggtggagatctgcgcatccggcatggcctcacggattttacgcagaatggcaaggaacttcgcagaacgatacgaacggcgcatggcgcgcaggattcggtcggatccggactgcagcgggaaatgcagctggtgcatgacattgggcgtttcggccatggctgcgatcacatcgtcggtgaaggcggcgggatgcggcgaagtgaaccgcacgcgctccaatccttcgatctcaccgcatgcgcgcagtagcttggagaaggcgaaacggtcgccgatgccgtaaccgaacgagttcacgttctggccgagtagcgtgacttccttggctccttcgtccacgcactggcggatttcggcaagaatgtctcccgggcgacgatcatgttccttgccccgggtggtaggcacgatgcagaacgtgcaggtgttgttgcatcccacggagatggccacccagcttgacaccttcgacgcgcggtcggtgggcagctggcttgggaagtagttgagttcctccttgaccttgacctgcgcatggccttcgatgcgcgcctggtcaagcagctgcggcagggagccaatgttcttggtaccgaacacggcatcgacccaaggggccttttttgcgatcttctcacggtcgagctgtgccatgcatccgccgactgcgatctgcaggttcggacgctggcgcttcagttcggcccacaggccgatggtgccgtacatgcgttccgccgcgttttctcgcaccgcgcatgtgttcatgacgatgaggtccacgtcatggtcgaggtattgttcttcggtggcgggcacgtagccgtccgcttcgagcacacccgcgatgcgttcggaatcgtgcacgttcatctggcatccgagggtgtgtacgtagaacacgcccttgcctcgcatggcggtgtcttctgtggcaggttccgcaagtttcgaggcgcgctccgcctcggtcatcatgtcttcgttcatagcattccatgctatcggcagggattcccatcacgcgccgtatgcaccttaatgcagcgtggcctcctgtggaattggagggatgacggcgttttcagcgctttttcagtttttccgcgctccttttgggtacactatggaaccgtgatacttgatagacagagccgcatcaataccagtgaactgcaagcgcggctgaagtcggtaactttcgacgatggtccgctgccttccgatcagatcaccgagttcattgatcaaatgcaggtgtatgagggcgcgatgtatgagatcagcaccaaactggagattctcgattccgagttccaggtgcgtttctcccataatcccatccatcatatggaacgcaggttgaagtccgtcaattccattctcggcaagctgaaacgcaaggatctgccgttgacggtggagtcggtcaagaacaatctgtttgacgtggcaggcattcgcgtgatctgcaattatcgcgatgacgtgtattcggtgtcgaattatctgtccgcgcagaacgatattcaggtgttgcgtgtgaaggattatattaagaatccgaagcagaatggatatcgttcgctgcacgtgatttatgcggttcccgtttttctatcttccggaccgcattacacgcctgtggaggtgcagttccgcaccatcgccatggattattgggcgagtttggagcatgcgctgcgttataagacggatttgcctgacgcgaagctgtcggagcattcgcagacgttgcttgattgcgcgagaagtctgcagaatgtcgaagcgcagatgcagaacattcatcgcgatatcaatggcgcgccgcaggttggcgaggcccctaaggccggctgacgtctgccggtttgcgtttggccgcatgcaggagctggtcgatgggcagctgggcgagtatggtgcccgcgaaaatgagcgcgcagccgaggtaggctcgagtggtcatgatttcgcccagcagaagcgcccctccgactgcggagaagaacgattcgagcgacatgatcacggacgctctggtcggaggcacaagttgttggcctatgacctgaagcgtataggctacgccagcagagcagacgcccgcgtagacgatggcgatccagctttgcgcggcaccggcccagtcgatggatccttcgatgatagagccaatccagctgatgatcgcggtggtggtgatctgcccgaatgaaagcaggatggggtccatgtctcgtccaaaggtgtctatgacgaggatgtgcccggcgaagaggactgcggtgaacagcagcaccatgtccgccagggtgatggatccgaatccgtcggtgacgcacagcaggtagaagccgataacggagatggcgacgctgatgatgacgctgaggtgcactcgtcgacgcaatatgacgaaggcaagcagtggcgtcatgacgatgtatagagcggtgatgaagccggaccgtcccgccgatccggagtaaaggatgccgtattgttggacggtgcttgcggtgaaaagcacgattccgcagatgatgctgaccacgatgggattgccggcccatttcggcatggcgacgattgcgccgttaccgagggtgatggacggttttccctgggtttcacggcgtttacgctcttgttccgctatggtgctgcggcgaaaccaaagcaacggtatcagagaaatggatccgagggtgaatcgggtggctccgaagaacagcggtgttgtggagtccatgccttgcacttgcgacacgaatgcgaatccccaaatgagggccgccagtacgaggcatgccatgccgccaatctcttttctctgcatgagcacccaccgtaaagcatgtctttgaccaacggataaagcctggccacattctggtcaggctttatccgttacgttgaccgaggagcaatgccaataatgtcccatcaaaggctgaaagccaaatgacgcgtgcgtccccaaaacgcaccgaaggaaggcgcacgaaggtacgccgactgaggagcaatgccggggacgctccgtcatttggatttcagtcgcgattgccgaggagttggagaatatacatgaacatgttcacgaaatccaaatacagattcagtgcgcaaaggatggaaaccttcttgaccatttcggggccttgggcggaatactgttcaagcatggcgcgggtggcttgggcgtcgtagacggtcatgccggcgaagagcagaagtccgatggcagagacgatcatgagggtggtgttgccgggggcgaagatcatgagaatcacttcggcgatgataagcacgatgaggccgacgaaaaggatggggccggccttgagcatgttgatcttggtggtgcgtccgaacatggtgagcgcgaagaagaagccggcgcacaatgcgagggaaatgccgatggtgccaagatcgtaggccatgaagatggtgctgagggtgaagcccatgagcgccgcatacacgtagaacatgacgtatgcggtggagaccttcattgtatggatgcgcgcgccaaggtagatggcaagcacgatttcaatgacggcgggggcgaagatgccgatgatgcccgtggtttggatgagtgccaggtacgcgccgctcatttgggtgatgatggcgaccacggcagtgacgatcaaaccaagggtcatgtgcgtgtatgcgctgttgacggaactgcgttcggcctgctcgtaggaataggtggcctgcacgttgactgcggcggtaccgttgggcgcataggcgtactgtggctgcgcattgtactggttgtactgttggttgtactggtattgattgttgaagccgttattctgggcgttgttaccctggggctgctgaccgaatgccataatcgctcctttttgctcgattgcgcatcacgatacggcattttcctgacgatttcatgaatattggcttaatctcatgatttcttcaaagcccgcataggtttcgcgttcgacacggggagtgtgccggacgcgaaagactgggacatgccatgtcagatggcgaacttgtacgtcactttggcggtgtcgctgaaatcgagaaggttcgtcacgtcgacggtgatttcggaatcgtctttaagcacatatccgagggttaccgtgccggttgctcctggctgcagttcagacagataggagccggaatcgtagccttccggattgtccaagtacatggcggtgtcgagttcctgaccgttttggaacactttcggattagccagcatggcgaaggagttgttcttatcggtagtgttggtccactcgtaggtgacgagcacggtcggctgattgttgtagtcgttgccggaacgcactgcggatacgattttgacgtgcatatcggtgagatcgccttccatgtcttgctcgcctttcaccttggtgtcggttttggtggaatcatcggttttggtggaatcatcggttttggcgtccttatcggcgtccgccgacgaggattgcgacgtgcttgtgcccgtgatgtcgtcaagcgccttgctggcggccgattgcatggccaaggtgatgacgatggccaacaccgacagcaccgccgcgactatggacagggctttgccacgctttttgcctcggaacgtgcccacgatggccacgatcgccaataccgcgccgacgagtccgaagatcgcagcgatgttgttgatgattggaatgaagctcagcaccaagccgagcgcgccgaacaccactcccacgatgccacataccgtcgtgccttgcggagccggggacggcatgatcggcgcgggtctcataccgttcggcgctgccgggccgccgttgggaatcggagcattgttgaactcactcatgatctttttctttcttctcgaagtggtcggaacactttcgagcctacgggatcggcttcgttcccggtattggacgaaagtccattcctgcctgcactttggggcgcgcggcttgcgccatcatgcccgatagctcaatggcatgtttccatgagtatgccgataatgggagtcatgagcgtgatcacaaacccttccaccgccgaagtgccagtgcgcaccagaatctggtgcacggtgccgatggtggtgtgcgcgagtttcgcctgtctggcgcaggtgtctttcgcatcccaacagtatgcgcaggatagtgccccctacttgtggatgatcgcgtgcgtgctcgttgcgatcccttcgggtttgattcttctggctcgcaacagttacccgcaagccgtgttctggaccgcatgcctactggtggtggcgctcccctacgattcgctgatcgcgcttatggcgttgacttctctgcttgcgcggagacagggaaccaaagtgacgcttcgatcagtgcttgccgcggcgacaacgacgatctggtcccaggtgcgagacgctttgcatcctgccgaggcttcgatctggcatgcgatcttctccaaaccatataccggagttcggtatggcaataccatggtgatgcttgtcgacgaaagaacgatcatcgcgagcgccgttgtggttgccctgattgcggtggcgatcgccacattggccggattgcatattcgctcgcgcgcccttgcgcgcgtggccgaagcgaaggctcagtcggccaacgagcaggtgagcaggttgcggaccacgcttgacaatcagcagcttgccgatgcgatagccgcggaagcgcatgatacgttggctcattcgctgtcgttgcttgcattgaatgcgagcgctttgcaggccgagtctaggaaattgaaggctgaggccgagcagttgggcaatgccaatgtggctggtatggctggaaagatcgccggcactaccgaggatattcgcaggcaggcctccggcgcgttggatgaggcgcatagtgtgattgacatgcttcgtcatccggaggatgctcgcctgcagttggctgcgaatgatgccgaagcgtcgttgacccgtgactcattgctgcagttgattggcgacgcccgtgccgcgaatatgcggattgatacgtggatcgacgttcaacagctggggcagttagatgagtccatcggcgtgattgcgtatcacgtggtacaggagggattgaccaatgtgcgcaggcatgcgcctggcgctccggtgtcgttgcaggtcgatgcgaaccccccgcaaggggtgcatgtgcacgtcagcaatccgacgatgccgcaatccccctcgcatatggcagacaccaggaagggggccggtcttcctggtttggccaaacgcatacagcaggctggcggaacatgccaatacggttttgaccaacataacgtcttccaccttgatgtacgactaccatgggttgggtgagcaccgaacgcaaccatgacgagcagccgatcaccgtcggcgtgattgatgatgatccgatgatctgccagatgatgcgtctgattttggaggattattcctccggacgcatcagcgttgccttcgcctgcaccaacgcagcagacgccatcgaacatgcgtcgcacaatcctcctgatgtcgtgctggctgatatcgccatgcccggcatggatggcattgaagccactcgtcagctccgcatgcttcccgatcctccgcatgtgcttattctgacgtcgctgagtccaaacaacacggtggaacgcgccatcgaagcgggcgcggaaggattcgtatcgaaaacggacgctccggaagatatcatccgccgtgtggccgacgtgtgcgaaggggagccacagttcaatccggcaagtcaacggcagctcatcggcgatttgcatcaacaccagcctcagtcgcggcgcgatgaggcccgtgccatgctcgacgccttgccggaacgcgaacgcgaagcggtgattctcgcggccgagggcttcaccaatgcggaaatcagcgagaaaatgttcatttcagaacgcacggtcaaagcgcatatttcatccgccgcagataaactctgcatgggccgcgtgcagatggcccgtttggtagaacgagccgacctgccgccacgactatgacatcatgcatcgtacacttgaacacagagcaacgcaatgaggggaacgccatgtcaatcagtgcaacggaaaagcctttaggcaaaatcttcacttcggattaccggttcgtaatcccatcattccaacgcgcatatacttggcaaacggaaaacatcgcgcaactggtcaccgatctgcaggacgcatgccacgacccggacacgccgtatttccttggatcgctgatcctcgtccatgatggacagaccaaataccaagtcatcgatggacagcaacgcctcatctcactttccatcatcatttccgtgctccgcgatctggaagacgaccccgaactcgtggaaaacctcaacgacctcatcgtcgagccaggagacaaactacgcggcatcaaagccgaaccacgtctcaaactccgcgaacgcgacaccaacttcttccgcatgtacgtgcaggaaggcgatctggagggactgttcgatctgcgcgacaacgatatcgaatcgcacgcgcaacgcaacatcgccatcaacaccagacaagtgttcgacgaactcgcgaaaatgcccacacaagaccgccgcgcattcgcatcatacctcgtcaacgaagtcaccctcgtcatcgtaaccaccgacgatctcgccggcgcacaccgtattttcgacgtcatgaacatgcgcggagttcccctcaccgcatccgacgtgttcaaagcaagaactatcgccgaaatctcccccgccgcacgcaacgcctacgcttcacgctgggacgacatcatggatccactcggcgacgacgcacagacgctcgaagaattcttcagcgacatccatctcatcatctcgcacaaagccatctgcacacaactacttgaggaattccgcaaggacgtgctcaaaccattcgtcaaaaagcagaacgtcatctccttcatcgacgacctgctcgcaccctacgccaacgcctggcgcatcatcgaacacccgaccgacgccaacctgccagacgatatcattggccaactcgtatccctcaacgactaccaaaccaccgactggaaaccagtagccatgtgggcgctcgtcaactccatacgcaacctcggcaatcccgacacacgcatattctccacgccgggcacacacactgccgcagcctcgcgcacgtcgaacaaaaacctcgaggaacctcaactccacgaccttgaacgacttcacgacgtactcgcggccctagaacgcgtaaccggcgtggacagtctcaacaggcaaaccccgctcaaccgacgcacacgcgcagccagcaccattcgcgacctcgataaaaaccacaccatccaacaaatccgaggattactcatcaccgacgaagaccgccgcaacgcgctcgcgcatctgcgtggcgacctgcagaccagtcccgccatgaagaaactgcttctggttcgggccaacgagcagcgggccgggcatcgtatcgcccgaccacgcagcctcaacgcgctgccgatcatgccggaacaggtcgcctccgactcatcgtttgcatcatggtctgaggcgacgcgcgaccattgggtcaaccgcatcggcaatcttgcgctcagtcaggctaatgacaagcagatcgcgggattggcatcctatacggaccgtcgtgaccgtatgctgctgtcggcgagttccaaacgcttcccgctcaccgccgagcttgccgacattgcggactgtacgccacaaaccttgcaataccgccaggatgaaaccattcgtctgatcgccgattattggaatatccgttacgatgccgagcgcaatgacctatccacgctcagtgaggagtcgttgcgagtcacggacacgtccacctccccaacatccaaacgcgtgtccatcgcgcaggtgctcgccgctggtctgctcattcccggtgagacgctggtatgggaccgaccgcgcaagggcgaacgttgggtggctaccgtcaccgccgaaggcaagcttcgactggatgacggcagcgagtactccacaccaaccgcagcggcccgtgccgtcggtggcggttcggcgggattgaccgtgtggaagcgcacgtcgaacggtcagaagcttagcgacgtgtggaaggcctatcgcctacgcaagcgctgaaaccgctgttcgttttgatgagtttgccgtttatcgacggtttcctattggcatgcgagccattcgaccgcaagtttcgtacgattcgtaacgttcgttttcgcgagaatatcgctgatacgattgcgaaccgtgccttcgcttaaaaacagtttcgcagcgatctcacgattgtcgtacccctcggcgaccagttgcatcacgtcccgctcgcgctcagtgagattcgcgaaacgaccggaaaaacgattttccccgttatcgccagcttgcgaaacgtgacgctgcgtctgactcgctttattgacatgcagtttccgcaacacctgcgctcccataaccacctgtccggccatcaccgactgcactgcgggaatcaccgatgagacatcctgtttgatcaggtagcctttggtgccgatttccaacgcctcggcgatgtacgattcgtccgcgaatgtggtaagtatcaggattttcgcattcggatgggcgtcgaggatctttcgcgacgcggcaagaccgtccataaccggcatttgcacgtcgatcagcagcacgtccggattatcttcttcatactgacctaccgcggtttcgccatcataggccgtccatgcaatatcggccgtgcctgtcgctttgagaatcgtggacagcgacgagcatacgattggatcatcatcgacgattgcgactcgcatcatacgttctccttcgttgttgcggacgctgccgcatcatcgtccgttttgggaatggacacgaacacccgccacccctcatgatacgggccgcacaccgcggtaccgccgagcgcccgcgcacgctcctcgatatccgccaatccaatgcctgaagcatcacgcattgtcgccgtacgcgcggcatcatggaactggcgaaaacaaacggaagattcccccatcataccgttgatgtttccttgggagccatcgctccacagggcgccatcatcctgtatgcgcagctgccataacgcaggaaaatcacgcaaggtgatatcgacattgcgcgccatgctatggcgaatcgtattgttcagcgcctcgcgaatcgtcgtggcgaaacagcgtgacaccgcggccggagccgcatcgatgccgttgctcaaggtgacgttcactgtactggaatcgtccaaaccatgcgcggatgcctcaatctgcgccacgaaatccgtgccttcgtctttcagatcatgcaccgcgccccgcaccaacgtcatcgcctcgcccaccgtgtcgtgaatctgcgcgaacccttgagccgcctgctcctggccagaaacctgagccaccacttgggccgcttcggactgcatgatggcccgggtaagcatatggccgacattgtcatgaatctcgcgcgctatgcgtgtacgctccgcgagcgtggccacacgaaccgatgcggcgcggtcttcctcgctttccgccaattgcgagcgcagccggcggatctggtcacgtttggaatcctgaagccgcttgttctgccgggtgagcgtgacattgcgcgcgcacaacaggccaaccatgaatcccaacactatatgcaatgccagcagtacggcgatgagtgcagctcccatatcatccgcatgcgcgtctgcattacggcaacggaccaaggtctccactacgggaatgatccacgcccatcgtgcgatgaccgtcgtgatttgcatcgcatcgtattgcggcatgttcggcaattgcgaacgcaagccggcatggttccgtcccgcacggggttgttcgacgttctgtgatatggcgggcagcatggccgcgttgtatgcggcgaccggcatcatcgcgcaccatgatggcgtgaagcatgcgccgcaatccaacatcaacagtatggcgatggtccatgccgacgagcgagcgtattcccctaccgcggcacagcatatggccagcaacgcgccgcataccagttcagccgatacgtctccgacgatatacaggtttgcgatcagcccgaacgtgaggaatatggcttgaagcaataatcgccgcatgccttcctccatcgtcgccgcttcttgtggttatgtcttcccagcgtagtgtacgttgccgccgttgcgggccatctttgccacgaaggtgacatttgtcatcttccatatggctgtgttgtgccaggtttatgacctcagacaccatgtcgtcgccgtttggtcggagacaatggaatcactatcgtaaacggcggttatcgctgttggaacatgtgaggtaaggagagccgatgagcgagcgtatggaaaggcaaacaggtgagagctccagcagcgcggtcaaggtgtcgaagctggtcaaacggtatggggatatgctggcgcttgactatttcgatcttgacgtgcatcaaggtgagattttcggtttgcttggaccgaacggttccggcaagaccacggcgattaactgcattctcgcattgttgacgttcgatgagggcacggtacgtgtgtttgacgaaccgattggcccgaccagttatgcgctgaaacgccgcatcggcatcgtaccgcagaatgtggctgtgttcaatgaattgacagttgaggagaatatcgattatttctgctcgctgtatgtgcctgacagggcacgccgtcatgcgctggttaaggatgcgctggattttgtgggcttgcgcgattaccgcaggttccgtccgtcgaaattgtcgggaggtttgcttcgtcgattgaacatcgcatgcggtgtggcgcataagccggatctgattttcttcgatgagccgaccgtcgccgtcgatccgcaaagccgcaatgcgattctggagggcattcagcgtcttaaccacgaaggcgcgacggtgatttacacgagccattacatggaggaggtcgagcagatctgcaaccgcattctcatcatggatcatggcaggcatttggccttgggcaccgccgacgagttgaaggcgatgatcgacaccggcgaacgcatcagtgtggaaaccgacgatctgggtggcttgcatcatgaggcgggaacgcagcaggcattggaacagttacgtgcgctgccatgtgtgatgagcgccgattatgacggtcatgagttgacggtgcgttgccgtaggggcgatcacaatcttcttgacgtgttgacgttgctgaaatccaatggcacgaatatcgggcatctttcctcccggcagccgacgctgaacgatgtgttccttgaactgaccggcacggcgttgcgtgactgacggaatcatggttcgaaaggtttgacattatgttgcagacattgctggtcaatctgaaattgcatttcagggagaaagcgcagctgttctggctgtttgcctttcccatcattctggcgaccatgttcaatggcatgttcggcaatatcgcggaaagttacgcattgcacacggttgacgtcgtcgtggtcaataacgacgattggcgcgcctctccgggcgcgcagatgctggtcgacggcatttcgtccgatactggcgcgaccggtgccgatggcgatcatgcgaaggtcgatgatgacggtgacaccatgccgaaactcatcaccgtcacggaagccgcatctatggaagccgcggatcgagcgctgcttgacgccaaggcgcaaggcagactgtccgtcgacggtagtgggaaactgcagctggccatttcccaagccacgcaaacatccgccacggatgtgatggcgtcgagcagtggtctggatatttccctgacggtgttgggcaatatcgtggacctgtacaatcgcaacaccgccgtggtggtcaatgccgcgcagcacaatccgtccgcgttgttggatgacgcgttcaccggcagcatcggctcgtcgagtgggttcacgaaggaagtgcagctgacgaatttcaagccaagcggcaccgcacgctactattacgcgttgctcggcatggccgcgatgatggccatgagtttcgcggtgaacgcggtatcgttggcccaggcaaacctgtcggcacttggcattcgccgttccgtcgctcccctgccgaaactgcaacagctgctggcaggttttctttccagttggatctgctcgttcctaagtctgaccgtggccatgctgtacattcgtttcggctgccagatttctctcggcggtcgtgaatgggccggcttgggcgcgtgcttgatggcgtcattcgccacaagcgcgttcggcacgttgatcggcgcaatacagggtgtttccacgagtgccaagcagggattgtgcacggccttggcatgcacgctgtcgctgttttccggtttgtatggctcgttcgccatggatttaagcgatcagatagcgcagcatgcgcccctgttgagcatgttgaatccggcgcaacagattacgaatctgttctacgacattctgtattacgacagtttccgcccgttctttgccacggtgggcgtattggctgcgatgagcttggtctgtcttggtatggcgaccgttctgttgaggaggcaacgctatgaacacttgtaaagcagcactgcgcattctcaaagcgcgcaaattgtatgtgattatctacttggtgctgatcggcacgatgatgttttccatcagctggcagatcatgcgtggctccacagctgccggagcgacgacgtatgagccggaatccgcccgtattgcggtaatcgaccgtgatgacgacgccgagcatgtggctcaatcgttgcgttcctacctcgctttggacggtgagatggtcaccattgatgacgattccatatcgttgcagcaggctgtcgcatcgaattatgttgatttgattgcgattgtgccacaaggtttcgccgagcgttatctgcagtatgcggataacgccacggctacgcaaccgaccatagataccgttgtcagttatgcttccggagccggatcgctcgcacagctgaaagtcaacgagtttctttcgctgacgcgtaccgcctatctcggcatgccgcaggcacagcgcacgctcgacgccgccatggcaacgacgttggatgctgccaccgccgatatgaaacagtcgcatatcgccgtggtgtcctcggactctgaagatgacggcaccacaccgggctcatcggcattcgcgggcacgctcaaaaccggcttgtatccactgttgctggtcatgccggtatgcacgttcctcgtggtcagcacattcaacgacaacgaaatccgccgcaggctctactcgtcccccgcgcgtctggtgtcgttggaagcgcagcaaatgctgacatgcgggacgttcggtctgctggtatgtgctgcgtataccgcggtgacattcctgttgatggcgctggccggagtgtcctttaccggcctgaatgccgtgaacgtaggcttgtcgttcgtgtcgctgatggtctacacgcttatggcgatcgcttgcggattcctgttggggtcatccggtttcaatgaaatggcaacgaacggtttcgtcaatgtgttcgctctgctggtcatgttcacttccggtatggcgttccccgtggatatgatgccagatcccatgatcatcatcggaaaactgctgcctggatggtggctctgctcatcgatagaccacgtattcggactgggtacggcctcctcgagcggcgtggactacggcgcgtgggcgtcatcaaccggattggtggcaatgttcgcggtagcgttcatctgtctgggcttggccttgggacgcattcggcgagcccgcccgacgttggcctcccccgccacaacgcagttggccaagtagtcgacgccaacactgtggcagccgcatgacgatcgcatacgacgtccacggtctacttgagcatattcctccggtaggctgtgggcgtcgtatgcatgtactgcttgaacgtgcgcgtgaagaatgtcgatgatgagaaaccaagttttttggcgatgtcggaaaccggcatcgatgtggtgtccagcatttccgctccagctctcatacgcacgtcattgacgaattcaatcggcgtctgatcgaccatctcatggaagatctgcgcgcatttcgtacggccgacggaccctgctgaagcaatctcctccagggtgatctgtcgaacgtaattgtgctgcacgtaatcaatcatcttgctcaaaatagcaatcttcggattcttcctgtcgtatttggaagaaccattcttgccatgttcgcccgctatggccgtcagttcacgcaccatcgtataaaaacagctgagcacggtcaacgatgccgtatcatcctttaatttcatattgtcaacggtggcgggatgcatggtctgggcagccggcatctgaccgaatttcgcatcatgcagccgcatcatgcattccagcaacgcggatccatgctcatcttcaggatcacacaccatgtacgggagccgttcgtccgccatcaacggagccacaaagcgttcataaaccatgttcggcatgcacatgcatgaagggttcagcagagtgcaggaaaattcacaatcggtgccgtcctcggtgaaaccgtaatgcaattggcgcgaattcacgaaaatgccttggccttcttcgagacgaatgctttcgccgttcacgaaataccacatgtgtccacggatgatgtgggtgaattcgaagtcgatatgccaatggcattccgcgcgcatgttcggatactgatgcagcagcgaatgttcggtgaatgagaagaacatcggcgcatcatattgcaccatttccgcgccgttgggcttgcgtccccagttggtgaccggcatgaactcatatggaagacgaccgtcttgcgcaagttcaggctgttccgtttgttcgttttgtccgacctgcacgtcacgaacgtctaatcccatctgtcccatgcaataccccatcagtggatacggtaaataatacgaaaatcaagaacgataatacaacgaaatacagtgtcaacgaataatgatgccgttgaatggaacatgatatgtcacgtcaatcgattgacgtaatacagcagaggaggcagcatggtggaacccaccaatcatccggcacgcgacgaatgggagcgtatgctctccggcgaactgtatgtggccgatagtccgcaacagcaggaagcgaatatgcgcaagcgtcgcctggtgcaggccatcaacacgtccgaatatgacgcgttcaaagaacgtgacgaactgtttcacgaactgttcggcgcatttggagagggtggattcgtggaacccccattcaactgcgattatggatgcaacacgttcatcggcaagaatttctatgccaacatggattgcattttccttgacgtggcacgcatcaccatcggcgaccgcgtgttcttcggcccccgagtgggcctgtacacgccgtatcatccgatcgatgcgacggtgcgttcctccggccctgaaggcgctcgtccgatcaccattggcaacgatgtctggttcggcggcaatgtggtggtcggccctggcgtcaccatcggcgatgatgtggtgatcggtgccggatcagtggtggtcaaggacattccttcgcattcggtggcagtcggcaatccatgccatgtgatccgtgagatcaccgacgccgaccgcgaatattgggaaggcaaggccgcggaatatcacgcttggaaggattcgattcagtaaatcgttagttcacgcaccgcaccatcctcacatcatcatgcaatcttccatcacttggcgcgagtttcttcgacagacgttgacgctcgccctgcccatcgcgtttcaacaactgatgctggcgctgtcatcgtgcgccgacactcttatgctgacgaacgtcggtcaaaacgagctgtcggcagtgtctcttgccacgcagttccagttcattttcagtttgtgtcttgccgcgctcacgcttggcatgagcattctggtggcccagtattggggtgcgggcaacacgaatgccgtcgaacgtgtcttggcgttcatcatgctgtatgctggcggattgtcgctggtgtttttcgcattgacgctactcattccggaaacgttgatgtcgattatgacgaacgatgcgacgctgattgccatcggctcacagtatttgcgggtttcgtcggtttcgtacctgttcatcggttcgtcgcaaatgtatttgtgtctgatgaagaatgtgggtgcggcggttaccggaatgacggtaagcacggttggcgtgatcgtgcatgttgcgctgaacgcggtgctgatctatggttggttcggtttacccgcattgggtattttcggcgcggcgatttccacggtgatttcccgagccatcgaactggtgtggtctgtgcttgtagccagccgcaatggccgcccacgtttgcggttgtcgatgatgttgcatccggatgtggcgttgcagaaggatttttggaagtatagtctgcccgtgcttggcaatgagctggtttggggctgcggtttcaccatgtacaccgtgattatgggtcatcttggtacggatgcggtggcggccaattccattgcgaatatcgtcaaggatctgttggtctgtttgagtcttggccttggcaatgcgggcggcattcttgtcggtaatctgcttggccgcaatgctttcgatcaggcgaaggttatgggcgacaggctctgtgtactggtggcggcagttggcgttggaaccggcctgttgattatcgcggcacgtcctttggcgttgcagtgggcgggattgacgccgcaggccacgcgttatctgtcggttatgctgtttatctgcgcctattatgcggcatgcgggtgcatggccaatctgactatcgccggtattttccctgccggaggcgattcccggttcggacttgtctgcgatgcgagcgttatgtggcttgtcgtcgtaccggtcggtctgttggcggctttcgtgtggaagttgccggtattggcggtctatgctttgctgaataccgacgaatgcatcaagatgattcctgctttgctgcattatcgaaagtatcgttgggtcaacaatgtgacgagacagaccgattccgccgtagtatcaaacgcatgaaaaaccggtagcaacaaagcccgtgtcatactgcattgcacagtgcgacacgggctttgttatttgccgatctcaatcatgtgattatttatttcatgagattgcgcagcacatactgaaggatgcctccgttgcggtagtagtcggcctcgcctggggtgtcgatgcgtacgaccgcgtcgaattcggttgtggaaccgtcttcgtgggtggcagtgacatgcaccgtcttcggaataatgccattgttgaattcttcaacgccggcgatatcgtacgtttcggtgccatcaaggccgaggctctcataggactcgcctgcggggaactgcagcggcagcacacccatgccgatcaggttcgaacgatggatacgttcgaagctttcggtgatgacggctttgacgccgagcatgacggttcccttggcagcccagtcgcgggaggaaccggtgccgtattctttgcctgcgagcaccaccagcggaacatcatgttcgatgtagtcgcgggatgcttcgaagatcgtggtcggcttctggtcaaggaaatcgtaggtgaaaccgcccggagtgacctcttcccccacggacgcgagcaactggttgcgcagtcggatattgccgaacgtgccacgtaccatgacctcatgattgcctcgacgggaaccataggagttgaagttcttcggttcgacgccacggtcggtcaggtacttgccagcaggactggatgccttgaacgcgccggctggagaaatatggtcggtggtcacggaatcaccgagcagtgcgagcacgcgggcgccatgaatgtcttcgacgggatccggtgtggccttcatgccatcgaagaacgtctgcttacgcacgtaggtggaatcctcattccatgcgaacagttcgccttctggaacgtcaagtcctttccaacgacggtcgccttcgaatacggaagcgtaatccttcaggaacatctcacggctgacggtaccgtccaccacggcggcaacctcgctattggtgggccagatatccttcagatacacatcattgccgtccggatcctcgccaagcggctgagtttcaaaatcgaaatccatggtgccagcgagcgcataggcgatgacgagcggcggagatgccaggtagttcatcttgacgtccgggctgatgcggccttcgaagttgcggttgcccgacagcactgaggtgacggtcagatcgttggcgttgatggcttcggagatttccggcagcaacgggccggagttgccgatgcaggtggcgcagccgaaaccgaccagctggtaaccgagcgcgtcgagatcgtcctgcaagccagccgccttaagatagtcggccacaacctgggaacccggtgcgagcgaggtcttgacccacggcttgggcttcaaacccttggcatgcgcgttgcgtgcaatcaaaccggctgcgatcatcacggacggattggatgtgtttgtgcacgaggtgatggatgcgatcgccacatcaccgttggtgatgtcgaagtcaccgcggaagtcggtggaaacggcaaccggctcctgcacggtcttgtccgtttcgtacgcgggcaaggtttcgacgaatttcgctttggattcagacagtttgatgcgatcctgcgggcgcttcgggccagcgatcgacggtacgacagtaccgaggtcgagttccaggtattcggaatactgcggttcgacgtagtttggatcggtggtgtcgccccacagcttgttcgccttggcatacgcttcgaccaatgcgatctgttcttcggaacggccagtcaagcgcagatagtcgagagtgacgccgtcgattgggaaaatgccgcaggtggagccgaattccggacccatgttgccgatggtggcacggttggccagcggcaccgaggcgatgccatcaccgtagaattccacgaatttgccgaccacaccatgctggcgaagcatatcggtgatggtcagcaccacgtcggtggcggtgacgccttcaggaatggaaccggtaagcttgaaaccgacaacacgcggcaccagcatggagatcggctgtccaagcatggccgcttcggcttcaatgccgccaacgccccaaccgagcacgcccaagccattgacggtggtggtgtgcgagtcggtgcccacgcaggaatcaagataggcaagagtcttgccaccgttttcttcgaccttggtcatgatgaccttggcgagatattcgatattgacctggtggatgatgcccgttcccggcggtaccacgcggaagttcttgaatgcctgctgaccccaacgcaggaactggtaacgttcgccgttgcgctggtattcgatgtccatgttctgttcgaccgcgtcggcgatgccgtacttgtcgatctgtacggaatggtcgatgaccatgtcggactgcacctgcgggttgatgacctcaggatctcccccaagatccttgaccgcatcacgcatggtggcaagatccacaatgcagggcacgccggtgaaatcctgcatgaccacgcgggacggggtgaactggatctcatgactcggctgtgcagccggatcccaatccaacagtgccttgacatgatcatccgtgatgttggcgccatcgatgttacgtaccaggttctcgacgagaaccttcaacgaatacggcagatgatcgatgcccggcagatctgcgatgcggtaatattcgtaatccttgccgtccaccttcagggtgtcgagctggtcgtcgcgcacagacatgctacctccgagctttttggctgtataacacagctgattattcgtcgcctacgatacagccaagttaattcagctctggcgtgtcttcttaaagtatgggacaatactcggaattttcggcaccaaacgcaaacacaccaagaacacgagtgccgaaagcaccattgccaccgccgtcgcagccagcatctgcccggtcggcaccaccagcgcgaagaaattcgccaccggttttacgagcatgcccccgaatccaattgcggcaaaggccaataccaatatgccacgccacgaatgcaacggctttgccacccgcgcaagcacgaacactcccatcatgagcagaataatcgcgttgacgccacgcagcatcgccaactgcgcacccgaatcctgcacattccacttcatgaatatcggcagcagccacgacgtggacaaaatcgacaatccgaccgccacaccgcagggcacagcaaaatgcagcacgcgtttcaggaatcctggaatataacgacgcgtgttcggagccaacgcaagaatgaatgccggcatgccaatcgtcaatccacccacatatgtgatgtggcgaggcagatacgggaatggtatctgcgtcagcaccacacccaacgaaatcagtgcggaatacacggttttcacaaggaataggcttgccacacgttccatattggccatgacctgacgccctcgcgccaccacatcgggcagatgtgagaacttcgaatcgacaagcaccacctgtgccacggccttggtggcgggcgcagcattgcccatcgcaatacccagatcggcctctttgatggcgagcgcgtcgttcacgccgtcgccggtcatcgccaccacatgctcacctgcatgcaatgcctccacgatcgcctttttctgatcgggcagcacacgcccaagcacatccacgttttccagtacttgcgccagctccgtaatgtcagcgggcagctcacgcgcgtccatgaatcgtggttcatgttcgccggtcagatgcacttttcttgcgatcgcgccgacggttacgggattgtcaccagagatgatgcggcaacgcactccttgttcacggaaccatgcaagcgtttcttcggcgtcggcgcgaatatgttcggaacagcacaccaatgcgacagggcacgatgccggattgagttttggatcggtttcgtaatcgtcgggcgctgcaccgtagattcgcgcgaccagcagcacacggttgccgtcattggcgagatcattgacttgtttgagtatgtcggcatggtcgccgttgatttgggaaagaatgacttccggcgcacccatcgtccacactgcattgccgtcatagatcgaactccacttgcgcgccgacgagaacggtactcgtgcctcgacagtgccgtccgcaaatccctgttcccgtagtccagacagaatcgcttgccctgtaccgttgggctgtccttcgttcgataggtcgaatagagcctgtctgacgtcatgctcgttcacggtgcctcgcatgtcgtcggggccacgaacacccagcaattccaacgaatcgagtcggatggtgccgtcggtgacagtaccggttttgtcaaggttcaggcaatccacacgagcgagagtctccacggattccagctcctgcaccagcgtgttcttacgtgccaaacgaatggctgcgagcgcgaaattcagcgaggtgagcagcaccaggccttcagggatcataccgaccacaccggccactgcggaaatgaccgcggaacgccattcgccggtcgaaatggccacattccagccgccaacagtgcgtacctgcgaccagatgagcagtacgcagagcggcaccaccaggaaggtcatgaatttcagaatcgtgttgatgcccttgtttaggtcggatacggttttcctgtaaaccttcgcccgtgcggtaagtttggccgcgtaactgtgctctcctacggcggtgactttcaccaacgccatgccggagatggcggtggatccagagaaaatatcgcagccttcgcccttgcgtacggtccgtgattcgccggtaagcatggattcgtccagctccagtccccaagtgtgcacgatctgcgcgtccgcgggcacctgttcgccggaacggatccacatgaaatcaccgagcacgatatcgttgtgcggtatttcaacgtctttgccgtcgcggtgcacaagatagtcggaagccaccagaatcgacagtttgtcaagagtacgcttggctttcaattcggtgcagatgcctatgccggtattgatgatgatgatcatgccgaacaccgcgtctctccacgatccagtgatcaataccataaccatggccgcaaagatgatgccgttgaacaaggtgaacacgttggctcgcacgatatcgataagcgaacgtgaggtcgatgccttgaccacattgtccaatccgctttccctgagggcgatcacttcgccttgtgtcagccccgtctcttcgatgaggggcattgttcgactttcgctcatgattgccagcctaccgtcacactcccgttttccggtcaacttcttgtgaaacacaggtaaaaatcagggaattttcagggtatttcatcaaaagacgaactgctggtcattcataccgacatggtgcaaaaccatatcagtgggtaatcgtggttaccagcatttcccggtcgtgaggatcattattggccacggccacagcagcatcgtcgagcggtatcgcgtcggtcatacgatcgttgaccgtcatggtagccgcatacagtttgttgtctttcggcacggcgataggattgagaagcaccactggaacgcccgctgttcttgcggtttccaaagcatcattccagttttcggcattggcttcgttcgcgtcgattcctgcgatgataatgaggtcggccttgcgttgcgccatgtcacgcacgccttgctgcgcggtggattgcgcgtccacagtgcccgagacggtaatgtacaccggcttgagtttaccggcttccatggcatccattgccatggaatcggcggtgacatcatccgatccaatcatggcgatggacaggctgtcacgatcctccatggagtgcgccaccgcagtattgggagattgcgtatcccccaccgcggcattcgacggcacgcaaccagatagcgccgcgcaagacaacgcaatcgcagtcattccaaaaaacgcacgacttgcgaataacggcatgctcactgttcgtgctttctgaacagcgccacagtctccacatgatgggtcatgggataaatgtcgaacgcgcggatatccgccaattcgtagccaagtaacacgagcgtggcggtatctctggcaaggcttgccggatcgcatgcgatatagaccacacttttcgcttcggcttcggcaatctgcctgcacaccttcgcgcgagcgccagcacggggcggatcaagcaccaccacatctggcttggcgagatcattgcgcacgttggcaagtgttttcgccacgtcgcccacacgcgcatcgacattacccagatgaatgtgcctcaaattacgttgcgcgttccttaccgcagttttgccgccttcgacgctcaacatgcgagtgcgctccgccgtcagcgtggccaacggcagcgtgaacagacccgaaccggaatacaaatcccacagacatgcggatttggcaccgtcaagctcgccgcgtaccaaatcgatcacatggttggtcaaagcgatcggcgcatgcctatgcatctgccagaaaccgcctgcatccacgttgtattcgaattcacggccggcgacaatcaccttttccgtaagctcacggcttccagcaaccacctcgccgttcacaagcacggcgtaattgtctgaaatcggcgcattatcgcgaggttccggaacggatagacgaatctgggaacccggttcgaagctcccttcccacacatgctcacgttcggccacttccagcaacgtacggctggccaacggcatggtatcaatcggaacgcgcacatgcgtgcctcgacggtgcatcgacggacgcccatcagcatcagcaatcatctcgatgcgagtacgccaatgcaaacctcgctccgcatcgtcttccgacatacgctcaatgggcacttccacgtcgacgtggccgagtcttgccatctgttcggccaccgacgtgactttccatttcagttgccctgcaagcgacacatgcaccaagtcagcgccgccgacaccaccacccatggcaaggggtccagctaacgaccatattggatcagtacggtcttcgctcgcttcgagtacttccaccacttcgcctgtccagaagcgatcctcacgatcatgcggctcgtccaatgcgacacggaccagttcgcccggcaatgcgaatcgcacgaacacaacacgtccgtcaatatgaccgacgcaacgaccctggtcggcgtaccgttcaatgcggatggtcgattccatcagtgctcttccctcatttcggtagtttgtgctgcctcagcatcgtcttcagaaacttcctgcatcatcttatgtcggtgcattggcgtcgccacgatcagatacgagacccaaatcgcgagcgcccagaacggaatgcccatcagcagacgcgctgttcccagccagccgacgtgattgccgagatagagcggcacctgcacgatcagacgcagcgcgaacaccccaacccacattgcggtgatgatggtataggcgcgattgagcgccttgtcacctcgccaatcggcaagccaggcacgaaaatgttcagtcggtaacgttcggatgaactcgatgaccaatcctaagccaggcacccggaccagcagtgagatcgtcagcaaaacaacgtaaaaggcgttggtgagaaatccgaacatgtaatagttacgtgcctcgtgactgttccatgcccagatcaggcagatacctactgccagcaagcctgataccgctcccatgacggactgtcgttggcacaggcgcacgatcacctgcagcacggccaacgcagcggacacgccgatggtcagttgcaaattggacgtgatgacgaacagtgccacgaacacgacgcccggcagcatcgattcgataacgcctctcggaccgccgatggcgtcgatcacggaaaaatcgtcagtattaccggcgtcggcaagcgcaccaagaccagttcgttttttcgcttcggtttcagccatacgtattagctatcggttcaagcggctcaacgcacttcggagaacatcggtccacgagacagcgtggtcttgacctcaacctgctggtcggagtcgaatggacccttcggtttgccgggaatctcagtcttctgctcagcctcttccgcagctgccttcgcagccttgcgttcggccggagcgaccggcggatgcatgggaataaggtcgcgtggcgccaacggatcatcgcctcgttccaccacaatatcagcgaagaactggttcaatgcctttgcttcctcaccctcaggatcggtggcagccttgcctgagaagatgccgcgcaacatccaacgcggaccgtcgacgcctacgatgcgggtaagcaccttgcgtccacccttgacggtaaccggcaatgccagttcggtgccgaatacgccttcgacttccttcgcatccttgttggcttcaatcaggtcggcacgaacgtcatcccacaatccgaacgtcttcggtgccgcgaatgcctcaatctccacactggaggaaccgtaggtgatggtggtgccaagaacctgctgggtggcacggttggccttcactcgcaattcaatgcccttcaggaacggcagataatatgatcccatatcgaggtactcgtcgtagtcgggaacgttctcatcttccacatcccacggaccatgctcgtcaccgcggccctcgtattcagcggaaggctccggaagcgccacaacttcctgagcttcgtcaacattttcagctgcgtcgacagcctcttcgttttctccggcggccgcttcaagagcttccttgctctgatgcttcttcttaccgaatccaaacaatcccatgatgttcctcatttcataacagttgcaaccgtgaatagcctagcacctatgcttaatatgggctgggaatcggggtgtgatattccaattcccagtctgttcacgataaaaagtggcttaaatgtcatacataatgctgagcggcgcatgatcggaccagcgcaggtcgtaggtcggagccttatcgatcacgaatccgcaggccgtatccgccagttccggtgttgcgaactgatagtcgatcctccagccgacattgttgtcgaatgcacgaccgcgctggctccaccatgtgtacggtccttggatgtctccggcgagattacgcatcacatccacaaactccagttctcccaaccatttgtcgacatatgcgcgctcctcggggaggaacccggcatgcgtttcgttggctttggcgtttttgatgtcgagcggcgtgtgcgcgatgttgaaatcaccgcagagaaccgcttgttttccgccgtgtgctgcctcgtcacgcaactgttccatgcgtatcagcatggtgtcgaggaaacggtatttctgcttcattttttccggatcatcggtatttcccgcatgcacatacacgcaaaccacggtaatgacatagccttgtggagtttgcatgtccgcttcgatccaacggccggaatcgacgtcatcctcaagtcccggcaatccatatcgtttgtcgacaaccggcaatgccgacaacagacctacgccggcacgccccttgatacggcagatctcgttcatgcgatgcaattcactttgatcagcgatacggcctgcagtcgaatattcaaaaccgaattcgtcaaagatgagatcgatttcgttttgcggagcacgtacttcctgcatgcaccatacgtcgggagtgttgcgacccgcccattcctcgatacctttgcgtttcgccgcgcgaattccattcacattagaggttgtgatagtgatcgtcataacgtcctagagtagccggaatacaagaaaagcctccggcaatgccgaaggctttattttgagacatatcggtcggatcagtcaagaccgagctgcagcttgccgccggggatggcgtcaagcagatcacgagtgtactgcttttgcggatgctcgaagacctcgtcagtggtggcgtgctccacaagcttgccgtgctgcatcaccacgacctcatcggcaatctggcgcacaaccgccaaatcgtgggtgatgaacaggtagctcagtcccttttccgcctgcaggtcattgagcaatcgcaacacctggtcctgtaccagcacgtccaaagcggatacggcctcgtcgcagacgatcacgtccggatcgagagccatggctcgtgcgatggcgatgcgctggcgctgaccaccggaaagctcgttcgggtagcggaaacgcacagaccccggcagttccaccatatcgagcaactcacgcacacgggcagcacgacttttcttgtctccaatgccgtggatgcgcagtggttcttcgatggaacggtaaatggagtacatcgggtcaagcgaaccatacggattctggaacaccggctgcacgtgacggcggaagtcaagcaattccttgccttggaagccggaaatgtccttaccttcataggtgacggtgcctgaggtcggttcaagcagcttcagcaccatgttggccaccgtggacttgccggaaccggattcgcccacaatcgccagcgtggtaccctttttgacggagaagctcacatcgtcaacggccttgaacatctccttcttgcgcggcagcttgaactcgcgcgtcagatgatccaccgtgatgatggattcgccggtcttcagagaatcctcattcaccttgtgttccatcacgcggctggcatcgccaccatgctccttgacggagatgatgcgctgcgaggccaacgacggcgctgccgacaccagtcgcttggtgtacggatgctgcggatgctgcagtacttccagagatgggccggactcaacgacctgtcccttgtacatgaccacgatgtgctgcgcacgctcagccgccaagcccaagtcatgggtgatgaacagcactgcggttcccaacgaatcggtgagcatctgcaggtgatcaagaatcttcttctgcacggtcacatcaagcgcggaggttggctcgtcggcaatcagcagttccggacggcatgccaagccgatggcgatgagcgcacgctggcgcataccaccggaaaactcgtgcggatactggcgtgcacgagtggcggcatccggcagacctgcctcagaaagaagacctgcgatgcggtcgtccatggtagagccgattacatacttcttggcgatgtaccaagcgtcatcctcggccacgccggccttgatcaggtcgtcagccacgcgccaacgcgtttcagatcccggaatccactccgactcgaagtatgccacggtcttgtcgaagtcgtcgccggtcttgccgatcttggacagcgcttccttcgccgcggacaacagctccggaagatccttggagccaaggaaagtttcatcgtcgttgtttttaagctcgacatcagcatcggcgagagccttcgacagcgaggaacgcttctcatgggcgatatccatattgttggcgaccagcgcctccttcacctgggtgccgatacgccacaccgggttcaggttgctcatcggatcctgcgggacaagacccatcttgttgccgcgcaacttgtcgaaatccctctgcttgtaaccggagatttcctcgccgtcaagcttgatggatcctccgaccacatggcctgtgcctggaagcagaccaagcaccgccatagcggacgtggatttgccagagccggactcaccaacgatagccacccactgacccgggtatacgctgaaagaggagttgcgcaccgcatgtatcggccggccatcatcagtggtgaagtcgacctggaggttcttgacttccagcagcggaccgttggcgcgttgcatggcctcgagcttgttttcggtattcatttcagtcatcgaatatccctcacttacactcacgcacggctcttcggatcaagcgcatccttcacagcgtcgcccatcatgatgaaggcaagcacagtgatggcaagcgccgcggacgggtagaacagcaccatcggatcggtacgcagaatggactgcgcattggagatgtcgccaccccagctgacggtagtggtcggcagacccagaccaaggaagctcaacgttgcttccaacacgatgtaggtagccagagacgttgtgcccaccacaatgatcggtgccaaggaattcggcagaatgtggcggaacaggttacgccacggcgtggagccaagtgcggtggaagccgtattgaactccagattcttggcttccataacagcgcctcgcgcaattcgcgcaacggatgtccagccgaacaacgtcatgaccagaataatcttccaaatggaaccgttggtcttgaacatctgcagcaccacgatggcaccaagcaaaatcggcaaagccaggaaaatatcggtcaaacggctgagaatgccgtcaacccagcctccgaagaagccgctcaatgcaccgatcagcgtgcccaacagcaccaccagtaccgtagcgaacacgccgacgctcagcgaggtacgtgtaccatacaccacgcgggagtacacgtcgcatccttgcagatcgaatccgaaaggatgtcccttcgaagccgattccaaggagttctcaagcgtgcagtaattcggattctgcttggtcatcactcctgggaacagcgccacgaagataatgaacacaataagcacagcggagatgatgaacatcgggttcttgcgcagggtacgccatgcgtcagcccaaaggcttgaagccggtacggactcgtcgaccgagtcaacgtccttaagcggcgtctcctcaagaggagcaacatatcgttcctgtcccggaagcgcgtgggaaagattcgttccgttcatatcagtcattgttcaatcctcccaactcacgcgtagcggattcgcggatcaagcgccgcatagagcatatcgaccagcaggttgcacactgcgaaaatcaacataagcagagtcacaatggacaccaccaggttgccttcgcccttgagaatgctttgataagtcaggtaaccaatgccgtgcacattgaagatggtttcggaaatcatggcaccgcccatcagtgcgccaagatcctgaccaaggtaagtgacgacaggaatcatggagttacgcaaaacgtgacgattcatgaccgacccattgctcatgcctttggcgcgtgcggtgcgcacatagtcaagcgcgatattggaggaaatctccgaacgactcaatctgatgatatatgccatagacacagatccaagcactattgccggcatcagcaggtcgatgaatcctggattggcaccggccgtaactggaagcagacgcaacttcacgcctaagaaatactgggcaaggaagcccgtgacgaaggtcggtacggagatgagcaacagagagataatcagaatcacggtatcgcaccacttgcccttgttcagaccggaaatcgcgccgaagatcacgccgaacacggcttcgaacacgaaagccatcagcgcaagcttgatggtgaccgggaatgcacgtccgatctggtcgatgaccagctgaccggagaaggtcttgccaaaatcaagagtcagcgcatttttcaggaacagcaaatactgtacgatgaacggtttatccagattgtattcggcacgaatctgcgcagcgacggcctcattgaccggcttatcgccaaacatcgccttaaccgggtcgcccggcaatgcgaacaccagggcgtacaccaaaagcgtcgtgccgagaaccacagggatcatctgcagaatgcgtcgcagaagatatctgcccattggtttctccttttttgcttattcattgtcaacctttttcagattattactcataatcatcggggaaggttaacgatttaccctgcaagttttgtggcaacacacaacaaactgttttatattgcagtttcatgggaatcagctgggaaaaatgcttggttaccggcatctacccctgacgcctcctggccacactgatctcaccctaaaacggtgcgtattacatggaaaggaaggaacggatatgatccgtcccttccttcaattggttcggcgagattcactcacgaagatcggctcacttgccggacttggtcatgttctcgtagaccggcaggttctgccagttcatttcgaaaccggaaacgccggtagcagccacaccgtaggcgttggcgtagtacagcggaacggccgggaggtcgttcaacagaatctcctgagcctgctggtacagcttgttggcctcgtcggtggtctgagcggcagcggccttggcgcacagatcgtcgaacgccgagctcttgtaatcgccatcgttggaaccattgccatcagcagcggaggaagcgaagttggccatcagatagttttcggcggacggataatccggctgccagccgctacggaatgcgccctgcaccttgcgatcggacacggcggtacggtaatcgttgaaggtcgggtacgggttggtggcagccacttcggaaccaagcgtgttgttgatggagttcaccacagcggtgtagatggtctcgtggccgccgtcagcgttgtaggcgaaggtaagcttgtcgtcggaagtccacgggctgatggcgttggccttctcccagagttccttggccttcttctcgttgtacttcagattctcgctgcccttgagggagtcggaatagcccggggtcagaggagaggtgaagtcgacggccggagtaccggtaccgttgagcaccttgtcgcagatgttctcacggttgatggccatggagatggcctgacgacgcagggtgccttcctcggtaccagcctcgaagtgcttcaggctggacggaatggtgaactgctggatgacggaaccggccttgttgtaggcctgtacggtctcatcggtttcgaaggtcttggtggcggaggccggcacggactccatcacgtcgagggcaccggactggatgtcggcgtaggcggcgtcatccttggtgtagaccttgaaggtcacgccgtcgttcttcggggtgcggttgcccttgtagttagggttcttcacgagcacgatctcgttgtcgtgatcccaggactggaacttgtacggaccattgccgaccggagcctcaccgaaggcatccgtgtccttgtagaaggattccggcagcggagcgaatgcggaatagcccaccttgatggcgaacacggaatcggactggttcaggtcgacggtgaactcgtgatcgttgacgatcttcagaccttcgagctgctcgtcacccttgaggttgtcggtgtcctgcagcgcgtcatagcccttgatggtggagaagaaggaggagccgaccataccgttcttggcgttggccacgtagctccaagccttggtgaaggactcggcggtcacatcggtgccgtcggtgaacttccagccatccttgagcttgatgtcgtactgggtggcgtcatcgttggcggtaatggactcagccacttcgttggaggcattgcccttggcgtcaaaggaaatcaggcgggagaacagcagatcaaccggcttgccaccaccggtctcgttggtgttgcccgggatgagcgggtgctgcggttcggaattgtatgcggtgatgatgttggcaccttcagcggcggtgtcgccgctgttggaggacccacagccgctcagcagcatgccgaaggcgcatgcggcggcagcgaaagccagtgctttcttcttcatataatcattctcctattcgatatcacatcgggattatcatcccacaaacggaaacgagccgacctactcatcgacgcatctctacttggcgatagtgcactattcttgctcaattgacggacaacctttccacgcaacccaaaaaacgcacgcgttccttaacgacatgacggcggaaaacgtacgttttccgccgtcatgtcgaacaatgtatccgaagaataagtcagctcttcgaaatctcgttatacaccggaacgttctgccagttcatgacgaagttcttcactccggatgcggcaacgccattggcattggagtaatacagcgggatggcaggcagatcgttcaacagaatctcctgagcctgctggtacagcttattggcctcgtcggtggtctgcgcggcagcagccttggagcacaggtcatcgaattccgaattcttgtaatcgccgtcgttggagccattgccatcagcagcgtcagaggaatacagctggtacaggtagttttcaggagacggataatccggttgccaaccggtacggaacgcgccggtcatcttacggccggtaacacggaatggtgaacgtctgaatcacggaaccggccttgttgtatggtaccacggaggaatcgaattcgaaggtcttgctgtcggcggacggcaccgtatccatcacatcaaggctgccggcctgaacatcggcataggccgcgtcggcgtccgtgtagatcttgaacgtcgcaccgtcgttattcaccttacgattgcctttgtaatcgggattcttgaccagcttgatttccttgtcatggtcccaggaaccgaacttgtacgggccatcggaaaccggcgactctccaaaggccttcggatccttgtagaaggattccggcatcggatagaatcccgagtaacccagcttggtggcgaacgcggaatccggctggctcaggtcgacggtgaactcgtgatcgttgacgatcttcagaccttcaagctgctcgtcacccttgaggttgtcggtgtcctgcagcgcgtcatagcccttgatggtggagaagaaagaggagcacagctgcgcgttcttcgcattggccgtatagctccaagccttggtgaaggactcggcggtcacatcggtgccgtcggtgaacttccagccatccttgagcttgatgtcgtactgggtggcgtcatcattggcggtaatggactcagccacttcattctgggccttgccatccttatcgaaagacaccaacccagcgaacagcagatcgataggacggccaccgccggtttcattggtgttgcccgggatcaagccattctgcggttcggagtcaaatgccgtaatgacattcgatccttcagtcgcgttcccagacgtggaagatccacagccgcccagcatcatgccaagcacacaggccgccgccgcaacggcaaacaccttgcttttccttatattcattatgtttttcctcattattcggattaccggtcggtattgtttccccgtaccagccttgcctaggtaatacaccctaaatcaagaagaaactccaattcctgttacaggaatgtaacgaaatatccatggaccgcgactacgcacggggaaatgcctgaccgtatcgggctttcaactgttcgatggagacatgcgtgtaccgttgcgtggtcttcagcgaggaatgccccaagagctcctgcacctcacgcaaatccgctcccccgtcaagcatatgcgtggcggcactgtgtcgcagagcatgagggctaatgtcgggaacgccggcatcacgcgcgcattcgtgcaccacacgacgtaccatccgctgatcaatgcgtttgccttgtctcccaagaaacagcgcagccgcggactgctcccccaccaacaggggacgcccatcatccagccaccgacgtatcgctttttgcgccggagcgccaaatggcatgactcgttgtttgttgcctttgccggtcactttgaccgttcgattggaaaagaccacatccggcacatcaagtcccaccagttcagccacacgcatgcccgttgcatacaacagttccagcattgcggcgtcacgcagctcaatggcctgctgcttcatggtccgttccttcggctgagacgtttcaccgtcctcatccacgcgttccatcagctgttcagcctgtgattcgctgagcacatccggcaacgtatcaggtattttcggggtcatgagcgcacaagccggatctgtcgccgtcacgccatgctcatgcgtccacgcgaaaaaaccacgtaccgccacagtttttcgggccatgctgcttttcgcatggtttttcgatgattccgccatccacatgcgaagatcttcgatggtcacctcgttaagatccctgcatctaagccgctccaaggcaagcaaacattcttcgacatcgcctcggtatgccttccgtgtgttttcactcaatccacggttggctttcagatatgtatcgaatgcctctacgctcttatcgaacagcatgccgatcagcctttcccgagctcaccagcaagcccgaatccatgaatttctttccattatgtgtccattctccgatagaaaccgaaataccggcacaacttgaaaggagaccaactatgctgtccagtagcgttcgctcagcgaatccgtcgatgatcgtttattcgaaggggagattatgccgattccaaacgaaattccagcaggtgcacgcattgtggtgcgcacctgcgaaggtgtcgatccaaaggaccagcgcatgaaattccgcgattatgtcggtcacgtacgttcttgggacgggcagacattggaaatgacgcgcgatgcggcagccaacggttcacgcccagagcaacgtgtcagcgttcccgccgacaccatcgtcactgtcaaaccggttccggaacgttccatgacacggccgcgcccatagcgcgtcacactgcggaacgcacctgtgccatagcttgacggtaaccgtcgaatcgcacgatatgctctcccctacgcgccgactccagaagcatctgctgccatccagtttcgggaattgccagttcgaccgtttcgcaacgttcttcgaagtcagattctttggcgagagccttgtattcacggaatggctgcccttgtatgaagaaacgcgccatctccttgtcgtcaccggcagtgggcgagccctgttgcgtggtcatgccgtgcagcacgttggccataagcgtcaaccgattggccatattacgcagcaacgcttcgacattggcggcgtcctcttccaccattgcacgggtacggtttggatcggttagcgcaacacgagtcatgtcccgccatgaaccagcggcgagcgcggctgcgatgttccggttgggattggccaccagctcattgatcatagctgtggaaatgacgtgtggcatgtgggaaatcagtgccgcgcaacgatcgtgggtcgcatcgtcaagaacgatgagtcggttggcgcaatgatccacaatcattgtcgcaacggcgcggaaccgctgatactcggtgttttcatctacggtgatggcccagagcgcgccatcgtaaagcgtcggatccgacgattcccatccggacagctcattgcctgccatgggatgcgcgcccacatagcaatgttccaatccaacggctttaacctgttcccgaatcattgctttgacactgccgacatcggtgagcgtggtgatgtccgtatcgatcagtggcttcaacgcacccaggatttgcggcatggccttgagcggattgcataacacaagcacgtcaggttttgtgtcggcgagcgcggccagtgtggacacacatcgtatgccgtccgctttcgcagtttcatatggacgatcgttatggttccatgcgatgacttcacagccagcattagcgagtctgcgagccagtgaccctccgataagaccaaggcctacgattgcgatacgctgcttcaccacatcagctcctttccgaccgtttcgctgttctgccaatcatctggcagatgctgttcgtcaagccgtacgcctccctgcggcagcatccatgaggtgactggaggattggggcgttctcttcgtgggtatacggccagagttttggcccagtcaccgtgttcggcgatttcgaccagcgcgccatggaagcgttgctcccatggcgccgcatcgagcgtcgcgataaaactgtatgtgcctgtgcgtcctttgattggccgcgagatgaaacttgtcatattgaggcctgcatcgcggaatacgtccagcaggttcgcgagtacgccaggacctgtgacaagcggaataagcgtcagcacggattcgtattccgtatcagcttgcgaacgaggctgttccaacagtttttcggcttccttgcgtggtgcgagcacaagaaaatcagtctgtgcgccttgataatcctgcacggcggtaccgatgcgcgtcacattgtagagttcaccgcaaatacttggcccgaaagctatttcgtttgctttgatatcgcgacatgcggcagcattggatggcgctggagtcggttccaaatggtgttccgcgatgaaacgtttgcattgcgcgagaccatgcgcgtgtgcggtagccacggtggcgtcttccggattggatcccgcacgcacatatgcgtcgaaagttacgtcgacgcccactcgcgcaaatccgactagatctttggcgtcgatgagcgcgtccagattcggcaccacgtaaccttcgacgttgttttcccatgccacgacgccccatccttcgccccgctgcacggcatcaaggatttgcggtacgtcatccgcagccaccaattcgaatccttccggctcaagatgggccagtgcctgcgatgcattgactgcggcctgatgggtgaaggtgccttgcggacctagatagaacagctttcgtgcgctcattcaaccccattccttattcttggtgttcccctgaaccttacctcattgccgtggaatcgactgccgattattccaccggttgggcgttatcagatgttttaccctcgttcgtctgcgtatcagcagcaaacgcaccatcacgcgtctccttacgcggaggtgtgacgaaccaacgtttcggcagcaccagcatcacaaccggaataagcacgacaccgtacagccacatgtatcctgcctgttcactgaagaacggcatgggatcatctccaccgaatcccacaggaatcatggcgtctcctcccggaccataccccgacatcaccatccagaccaccagagaggagccgatcaggtgcaatgcgaggcctgagacaccgtcgcgtgatcgagctgaccatgtcgaaatgatcaccatgagataggcgatcgccaatccgtagggaatattcatggatgcgcccatgcgatgggccatggttcccactactccgactatgattccggaaaccagatcgacgaggaaccgtccccaaatcggcagacggtatgaccatggcatcagttgcgcatcgggcgccgcgtcttgattcgacccatacatatcatgtgattgcttcatctgttgcatcatatcccctactatcgctcaccaacctgaaaagaaaaagagatacgcgaggacacgtatctcttttcatggaagcaataacagaatcacttgttcttctgcgcgttattctgctgagccgtcaaacggagagcccagcgggctcaccgtaggcgaagtgagcaagcacactaccgtgcttgcgaagccgacagaacaacgtgaagaatcacttgttattctgagcgttgttctgtcgacgctgcttggcgcgccacttgtaccaatcctcacggctgagaatgatcttgcgcacacggatggattccggagtgacttccacgcactcgtcctcgttggcgaagtccaaggactcttcaaggctcatcttgatcggcggagtcagggtttcgagcacatctgcggtggaggaacgcatgttggtcatatgcttggccagcgtgatgttcacatccagctcgtcaggcttgttgttcacgccgacgacctggccttcgtacaccggagactgcggttcgacgaagaagttgccacgtgcctgcagacgctgcatggcgtacggagtggcgatacccttgcgatcgcagaccatggaaccgttctggcgggtcacgatctggccagcccacggagcgtagccggcggagatggaggatgcgataccggtgccacgggtggcggaaagcagtgcggtgcggaagccgatcagaccacgggacggcacggtgaactgcagacgaacccagccggtgccatggttggtcatgttctccatacggcccttacggtcggcgagcagctgggtgacagtgcccatgtactcttccggaacgtcgatggtggtgttttccatcggttcgttgatcacgccgtcgatggtcttggtgaccacctgcgggcggccgacggtcagctcatagccttcacgacgcatctgttcggcaagcacggccaaggcgagctcgccacgaccctggacttcccatgcatccgggcgttcggtcggcagcaccttgatggacacgttgccgatgagttcgcggtcaaggcgatccttgatcatgcgggcggtaagcttgtggtccttgccttcggttccggcaagcggggaatcgttgatgccgaaagtcatggagatggccggatcatcaacgtggatcagcggcagcggacgcggatcggacggatcaacgatggtttcgccgatcatgatgtcattcacgccggcgactgcgacgatgtcgccagggcccgcggaatcgaccggggtgcgctcaagaccctgcgtacgcagcagttcggagacgcggaagttttcgacggagccgtccacacgggacagaccgtaggtcttgcccttttcgagagtgccgttgtagatacgcaccaagccgagtcgacccaggaaatcagaggaatcgatgttggcgacgtgtgcctgcaaaggcgcgccttcctcgtattccggagccggaatgttcttgatgatggcttcgaacagcggttcgagatcttcgttatccggcagaccgccattctccggctggttttcggaagcgtagccggccttggccgcgcagtagatgaccggcaggtcgaacagcgcatcctcatcgagatcgataccctcttcgataacgtcctgagccaggccgagcagcagatcggaggattctccaacgacctcttcgatacgtgcgtccggacgatcggtcttgttcacgcacaggataaccggcagcttggcttccaaagccttgcgcagcacgaagcgggtctgcggcagcgggccttcggatgcgtcgacgagcagcacgacgccatcaaccatggagatgccacgctcgacctcgccgccgaaatcggcgtgaccaggagtatcgatgatgttgagggtgatgccttccggatggccgtacttggcggccagcggaccggtgtactgcacagcggtgttcttggcgaggatggtgatgcccttctcacgttccagatcattggaatccatcacacgatccggaacttcctcacgttcgttgaacacgtgggactgtgccagcatggcattgaccaacgtggtcttgccgtgatcgacgtgtgccacaatcgctacatttcgaatatcgccgcgaaccgccatcgaaacctctcttagtattgctgttctcttgcgttaccgttcggtacatactggttatcggtacttacaaatccgtactccacacaaaccgagccaatcctagcgaaccattacgacagttccggtcccagcgctttcgcccacatacaaagtttgcggttgtcgaatctcaacaaccgcaaacgtatgatctcttgggaccactcaaaataattcgttaatcctcaagttccttaccagtgcgttccggcaagcacaacgccgcaacgcaggccagaatgaaggcgaccgcgaaaacgatgaatgccaccgccttgttgccaccggacagcgtcaggaaccacggcatgagcagcggagctatgatggcagccactcggccacatgccgcagcggcaccggacgcagcagcgcgcaggcgggtcggatagatttccggagtcaccgcatacagcacgccccacgcgccaagattggatgcggacaacaacatgccaaagcccaacaccgcagctacggaacccgcttgcgagaaagcaaacgcggccacggccgacacggcaaggaacacgctcagcgtcttcctgcggccccagatctccaccagccatgcggccaggaagtatcccggcaactgcgcgacggcgatggccagcgtatagccgaacgacttggtcagcgagccaaactggtcggccagcagcgacggcatccatgtgaacgctccatagtaggagaagttcacgaagaaccacgtggcccaaatggctgcggtgcgcgcgatgcactttttgccgaacagttcgcgggtgttgatcttcggcagtggtttgcccttcggggaagccactggctcgatgccacctgcctgttcgaaatagcgtacggcctgttcggcttcgtcctcacgccccttggattccaggaatcgcacggattccggaatatgaacacgcgtcacaatggcatacagcagcggcaacgcgccaatgagcaaagcccagcgccaaccccaatcgccggtattcggaatcacaaagtagccaatgaaggcggcgacaatccagccgacagcccagaaggattccaacagcaccgtcatacgaccgcgttgtttggtcggagagaattcagaaaccagagtggaagccactggcagttcggcgcccaaaccaagaccgatgatcagacgagcgatcaaaagcgcggtcaacgaccatgacagtgccatgccgccattcgccaaaccgaaaatcaccagcgtcgcggaaaagaccgttttgcggccaacacgatcggctacaaaaccacccagcgcagcaccgatcgccatgccgacgaagccgatggacagcacccagcttttctcggttggtgtcagattgaaatgcgggtcagccgcgatggccgccacaacgaaggacaccaagccgacgtccatggcgtcgaaagcccagccgataccggacgccaccagaagtttcctatgcgctttgttaaacggcaggcgatcaagacgctcattacgtgtcaacgaacccgacgaagcaaccgatgcggattgcacggatgtcatacttcttcctctcatacgaaacgaccatgcctacaaggcatgccgaaaaccagacagaatcgtctgaaaaggaaacaatccggaaagacgtcagatcgtcgtcaacgcggaaagcacatcatcctgcgtttcccgcacatcgaaatcatggcgatcccgagcatcgctccatgtcgactgtcggagcacatccatggtgtagcgatacaccgttgccggacgattgcgtccgacacgcaatttgtcaccggtgtcctccagctgcccggatgcgagcatcttacggcggaaattcgccagatcgatgctctgaccggcaacggcctcgtacacgtcatgcagctggctcagcgtaaacctctcgcctaccaatctggtgacgatctgcggatattcgattttgccgcgaagtctgctgagggcgtagtccacgatgtcgccatggtcaaatgccaactcaggcagatcatccacaggaaaccatttgacattgtcgtcgatactctgcccgagttgcccgttaagatcgtcgaccaacgcccaatagacgatggataccatcggcagcccgccgtgtgagcgcgctggatcgccgaatgtatacagctgttcaagataccgtggatgcaacgatgtcgtggattccagcgcaacgtaggcagattgctccagcgagtggtcagccctcaaaccaccaccgggcaacgcccactggccaagaaaaggctggcgcacgcgccggaccagcggtatccacaaggtggatcccgcactggttcgagcatgttcctgcgttccgtgggaagctggccccaaagcgagaatgaccacggaaacgcccacctgcggcggctgtttgcgccgttctgagacattgcccatgatcatcgcgacctcacctctccgatcttttgtcgatttgaattgttccggaatcacagtgtagcacttatagtcaacatgactataagtgcagtgtttcaccacaccgcttgaatttcaacccacgtatgcccttcaacgaaaaaggccccacgaaggagccctatgcgtcttatgcgacgatgccctgagcaatcagctctcgggcaacctcacgatattccttcgcggtcttatggttcggcgcataaatggtgataggcgcggccgcaaccgtggaatccggaagtttgatggaacgtgagatgactgaatggaagaccttgccttggaatgcctcataaatacgctgcaacacttcatcacaatgcaaggtatgcgtgaacatggtgacgagcactccgtacacttccagactcggattgatgcgggattgtactttttcgatggactgcatcaacaaggccacgcctcgcagtgcgaagaactcagcagccacgggaatgatcacgccatcggcagcggtcagcgcattcaccgtaagcaaacccagagaaggctggcaatcgacgatgatcacatcgtattcatccttgacctgacgcaacacgccagccagcacctgctcgcgcccaacttcggtgaccaactgcacttcagcggcggacagatcaatgttggccggcatgatatcgagattctcgaaatcggtatgtcgaatcacatcatgcacatccatgcgaggattgaacagtgcggtgtacaccgtatcttccacggtattggcgttgatgcccaaccccaccgtggccgcaccctgcgggtcgaaatcgacgataagcacgcgacgcccatactggctcaatgcaccagcgatattgatggaactggtggtcttgccgacgccacctttctggttgcacatggcgatgatcctcgccggaccgtgcgtctgcagcggctccggagcgggaaacgtctcataatcacgtccaagcaaatccgtaggcataccgtttaccttaccaacatccttgtgtcaattttcactgtaatccatgctagtccattgtcaccgttcaaaacggcagcaacaccatcatctggcgcgcggatgagacatcagatatgtctcaatcaggttttcaggactgatatgcgtgtaaatctgtgtggtggtaacgcttgcatgaccaagcagctcctgcacggtacgcacatcggcaccgccctgaataaggtgcgtggcgaaagagtgccgcaaggtgtgaggatgcagcggcttatcgatgtgcgcacgctcccccgctcccctgatgatttcccaaaccgactgtcgcgacaatctttttcctcgtttattcagaaatagggcacgccgttccacgggacctttcgatttggattccagcttaggacgccccgcatgcaaataccggatgatcgcttcgcacgcatagctgccgacgggaaccagccgctgcttagagcctttgcccataagtcttgcgattctgccgtctacatcgacatcatcgagattcgcaccgcacgcctccgacacgcgggcaccggtcgcatacatgaattcaagcaatgccttgtcacgcaacatcaccggatcatcgggaaactccgacacgacaccatcatgctctctgttttgagaaacggggatagagtccagcagtctagccacctcatcaacggtcagcacatcgggaagcgtgctcacgcccttaggggcctttacctgcgcggacacatcatcgacaacaatatgttcgttcactgcgaaacgatgaagcgcatgaatgctggccaaccggcgtgccttgcttcgagatgactctcccgactcgtcaaggaagacgatataacgttccacatcctgtgtcgtcacggccgcgataccgccaacgccttggtcggcaagccactgacgatacttcttcaaatcggcgccatacgccgacaccgtcgccttcgacagtcctcgttcaacgtcgatatgagcgaggaattgccgaattgtccgttcgaaatcgtccatcaccctccttccagcagatcccatccggctcatcgtataccactgagcggtcccttaccataggtcaaacgagccctgccatgcaacgcaggaacccccgcccattgctggagcgagggttcctgtcaatcacgctgaatcagcgaagaagctcaggcttccttcggagcattcacatcagccggaagagcggccttggcctgctcgacgatggccttgaaggtctccggatcagagatggccagctcggcgagagcgcgacgatccagttcgatgccagcgaggtgcaggccctggatgaagcggttgtaggtgatgccctcagcgcggacagcagcattgatgcgctggatccacagcttgcggaagtcgcccttgcgagccttacgatcgcggaagttgtaagtaaaggagtgaagcagctgctccttggccttacggtacagacgggagcgctggccgcggtagccggaagccctctcgagaacgacgcgacgcttcttgtgggcgtttactgcgcgcttgacacgtgccatgtttgattcctcagctttctattaagtcttcttattcgctctcgctatactcagcgaccgagcagcttcttcatgttcttgctctgggaagtagccagaacgccatcggccttcagtgcgcgacgcttacgagcggacttgtgctcgaggttgtggcgcatcgcggagccagcgtgcatcagcttgccggaaccggtcacgcggacgcgcttggaagcggcggaattagttttcatcttcggcattgctgccctccttgtttattacttcgtttcggaagtcttcggtttgtcggatgccactgcagccttggcttcggccgccgcctgagcttgggcttcctgcttggccgccagacgtgcagcctgacgggcctgacgctcggcacgggactgatcaccacgacgacgctgctcggactgggtgtgaaccttcttgcccttcggtgcgagcgtcatgatgatattgcggccttcctgcttcggagcgaattcgacggtgccgtattcctccacttcgctggcgagacgctgcaagagctcgacgccaccgatcggacgggactgctcgcgaccgcgcagcatgatggtgaccttgaccttgtctccaccgttcaggaagcgcacaacatggcccttcttgacttcgaagtcatggtcgtcgatctttagacggaagcgaatttccttgatttccgcagtgctctggttacgacgagcctcacgagccttgatcttctcgttgtacttgtacttgccgtaatcgatgagtttggcaaccggaggcttcgcgttgggcgccacctcgacgagatcgaggttcgcttcctttgccaggttcagtgcgacggaagtcgcgatgactcccacctgttcgccgttcgggccgatcagacgcacctgggagacgcgaatctcgtcgttaatgcgtggttcgtcgctgatgatgactccaatcctcatgttccattcgacggaatgctcccagatcggcagtttttcaaagtctcgcatgttcacggcaagccaaaacacccaattcgagggcgcaacaaagagccataccacagctcttccactgccgtttcatacggcaccagaggcttatgcctgaacccgaggccctgaaaggcttccaggtggagatatcccgctttcttgatttctcaagccttgtagataataccacacaccgcgaccacagcgtgtcgcataatgaaaccttctgaaacatcttctttaatcattccaacgccatattacactgaccccatatgacagataattccaacacatgcgtgattttcgcggctggcgaatactacagcgatacccccatcgttccgtctggagcattcattatcgcggcggacggagggcttgaccatgcacgcgcacttgatatgtcgcctgacgtggtggtgggcgatttcgattcgcttactggagaacgtccgacacagggtgaacacaccattgccctacctccagaaaaagacgatccagaccttctgtcggcactaaaaatcggctggtcacaccatgcgcggcttttccatatatatggcgcgctcggcggacgaatcgatcacaccatatccaatatccaactgatggcattgctggctcagcatggtgcggtaggttttctgcacgggaacggctccattgtgaccgcgatttgcgatggagcactcgatttcggcgagaacaacgtcgaaccaggacgtatggtttccgtattctctcattccgacacctctcttggcgtgagcgaacgtggactgaaatacgagatagatgacatgacgatgaccagcacacgtgtcaacggcgtcagtaacgaattcctcaacggagccgccgcccatatcggcgtcgaacatggcaccttggtggtgactttcccttcggaagccccactaccagcagtctcttggcaccacacatttgagggtgacctcggatcgttggacaccaaagtatcttcagcgcttgccaagcacgaactccaatcccgctaatcgcaaagcgaagaaaatcacctttcgtctatcacgttcatctcgaaaagatgatgtgagcgttcacggaaaaacacgacgttttctgaaacacacgcgcgagtgcgttgccttaagtacaggtgacgcactaaagtgggtgacgttggtaaacaatggcttctgtgtgcccagcacacgcgtggcctaccctaaagggagaattacatgacagttaagattggtattaacggctttggtcgtatcggtcgtctggctttccgccgcatcttcgagctgcaggctcgtggcggccaggccggtgacattgaggtcgctgcaatcaacgatctgaccaccccgtccatgctggcctacctgctgaagtacgacagcacccacggcaccttccgtcatgacgatggcaccccggttgaggtcacctccaccgaagactccatcgtggtcgatggcaaggaatacaaggtttacgccgagaaggatgccaacaacatcccgtgggtcaagaacgatggcgttgagttcgtgctcgagtgcaccggcttctacacctccgctgagaagtcccaggctcacatcaacgctggcgccaagaaggtcctgatctccgctccggccaaggacgagaccaccccgaccgtcgtcttcggcgtgaaccacgagatcctgaaggcttccgacgtgatcgtgtccgccggctcctgcaccaccaactccatggccgccatggtcaagctgctggacgagaactggggcatcaaggctggcttcatgaccaccatccacgcctataccggcacccagatgatcctcgacggcccgcgcttcccgaaggctcgcaacaaccgtgccgccgcaatcaacaccattcctcactccaccggcgctgccaaggctatcggcaaggtcgttccgtccgtgaacggcaagctgcagggccacgcccagcgtatccaggttccggatggctccgtcaccgagctgaccaccgtcctgaacaaggaagtcaccgctgacgagatcaacgccgcattcaaggctgccttctcctccaccgacttctacggctacaacgaggatggcatcgtgtcttccgacatcatcggagacacccacggtggcgtgttcgatccgacccagaccgacgtcaacaccgttgacggcgtgaccatggctcgtaccgtttcttggtacgacaacgagtacggcttcacctgcaacatggtgcgcaccctgctgtacttcgctgagatctccgagtgaaccatggcggagcaatccgcacagttcactaagtagaacttggtacaagggctttcgtctcacggcgaaagcccttttgctaaccgacacaaatacgttttagagtgaatcgatatgggcaagaaaaagcatgagaagggcgccggctccacgccggcaacagtgcaactcgaacaagcgggaatcccattcaaaacatacgaatacgcacattcgaacgaccatatggatgacggttatggggttgaggccgccaccaaactgggcttcgatgaacatcaggtattcaaaacgcttatggccgacaccggctccgaacgtgtggtgggcgtggttccagtaagcgggcacatggatctgaaggcgctggccgcagcagtcggagccaagaaagccgctatggccgatccaaaagtcgccatgcgcgaatccgggtatgtggtgggaggcatctcaccactcggtcaacgtacgcatcacaaaaccgtgctcgacgaaagcgcgctgcaatatggcgaaatactactgtcgggaggcaaacgcggcttttcgatcggcatcaatcccaatgatctgctcaaggtgcttgacggcatagccgcacctatcggcacctggtaatcaccggtaatagaagccggtcagcaggctggtttcttacgaagctcactggggagcacgaaatgcatgttctccttaatggtttcgatggtggtcacatcatcgaaaccacgctgttccagcgcttcgataacgcctgacaccaattcgtcaggcacggatgctcccgacgaaatccccacggattcaacgccttcaaaccacgcaggatcaagctcggacgcatcatccacgcggtaggcctttccgtgaggaccattcggcacgccatcgaagcgcgtgttcagcccctcctgcgcaacctccatcagacgaacggaattcgacgaattcgccgaaccaacgatcaccacgcaatcagactgctcggcaaccaacttgaccgcggcctgccgattcgatgtggcatagcagatatcggaattcggaggcatctcaagccaggggaaacgctctttcaacgcagcgatcgtgcccgccgtctcatccacgctcaatgtggtctgcgaaagcagcaccaatttcgcatccgaagaaaactcgagcgaatcgacatccgattcatgttcgatgaggtgcacatgttccggggattcaccgaccacgccaacggcttcatcatggccgttgtgtccgatgtagatgatctcgtacccttctttgacgaaacgcaacacttcacggtgcactttgctcaccaaagggcatgtagcatcaacgatatgcatgccccgagctgaagcttcagccttcacctcaggagacacgccgtgcgcagaaaagacaatcggaattcccgcggaagccgcggcatcgggaacctcatccaattcctgtacgaacaccgcaccctgagccgacaattcctcaacgacatgcttgttgtgcacaatctgacggcgtacatacaccggcggcagaccatcattgcgagacgtattggcagctttgagaatcgtctgcacagtcagaatcgccctgtcaacgcccgcgcaaaagccacgtggatccgccagtacgatacgcttggtcatgatggccgcctttcgtcacttcgtgaaaacctcatcaatactaaagcatgggcggcacgccggagaaacggcatcgccatacggcataaaacaggtagactgtggtgttagcggtaacgctaccgttaccggaacatatccaacggcactatggagtgactatgacctgcatcaatctgcctgcccgcaccggacagcaattctccatctcccatggcgactatgaagccgtcatcaccgaactcggcgcaacaatgcgcaagctgacctataagggcgaagatctgacggtcgcccttggtccggacgatctggtgacctgctgccacggccagatcctcattccgttcccgaatcgcatcgagggtggcgagtacacgttcgaaggcaagacctattcgctgccgatcgatgagcatgaccgcaacaccgccatccacggctacggataccgctcgttctggaagctgatttcgcttgccgaagacgcagtgaccctcgcctggcgttcccccaacatggtcggctacccgtttgatctatatgtcaccgccacgtacagcctcgccgacgacggcatgcatctgaccgtcagcgcctacaataacggcgacacgaacgcgccgtgggctttggccattcacccgtggcttgccaacagcctcaacggctatggcgacgaaatcgacgagcacaacgccaagtgcagccttacgctaccggctcgcacgcatgtcaccgtagatgaaaacctcattccgaccggcaccgagccggttgacggcaccaaatacgacctgcgcgaagacaccctacttaccgagcagccgttcgacgatgcatggaccgatctggagcatgccgaagacggttccgtcacggcagtgttcacccgcgccgatggcaagaaggtccgtgttggcggcgatgaaaccatcacttcgttccaggtgtgcaccggtaccaagttccccgcattccagcatcctgccggcgttgccgtggagccacagaccgcctacgccaacgcgttcaacacaggcaacgagctgatcgtgatcaagccgggcgaaaccaccagcacctcgctgttcctcggtatggccgagtaaacatgcgagtgagcgtgatcgagtgatccagtcggttaaaccggctgattccggtcatataaaaacccgacggataagtctaagtggccacctatcgaacaccggatttggcaaacgtctcgctcgtgtgcgataatcccgaaggcttattaatcgtaagtaaaggagtccaatcatgggcatgcgcggacgtaagcgcaaggatcgtcgtaagaaggccgccaatcacggcaagcgtccaaacgcctgatccctgccagcgtgaataacgctacagagcatcgaaaaccccgctgaatcgttatgatcggcggggttttcccatactctcatcggcttgctcaccgctctccacaacaatggtcgagcgttgcctcaaggcggtcgataagactctgcggggcatgctgcggacgcaaatacgcacgcatggccgcgatcaatgcccgttcacgctcgtcgcagcaacgttcggggtcgaaacaatcactggaggtgctaacgcgcacgctggtatgcgtcacctgtgtcacagtgccgtcctcgctggcggcgacagtggtgatatgccgttcgatcgattcactcatgctctgcccttccctgccgtggcatagccacgttccttcgcatagttggcaagttctcgtttcaactgcgtacgcgcgcgattgagacggctcatcaccgtaccgattttcacaccctgttcgtcagctacctgctggtatgatttgccgtcgatagcagcatcgatgaacacctgacggcgttccggcgaaagcttggcgagcgccgccatgatttcttcaggcgcgtaagcgtccaaatattcctgttccgccgatttaagctcttccggtgaatgctcggaagccgaatagatgtcccaatcgtcgtattcgccggtggaatcgttggctcgctgcggtctgcgcttggctttggcgtattggttgaagtaggcgttgcgctcgatggtcgtcatccatgcggcgaaattcgttccctcctgaaaggagtcgaacgccttgaacccccgttcgaaagtatcctgcaccaaatcttgggcgtcgtcgggatcgttggtcagcttcatcgcctgccggtacagcgcatcaaccacaggcatggcaagtttttcaaaacgcgcccttctgcttgccatggtttccgttcgtacttcagtcacagcttcattgtaatcacatcgacttccacatgccatgcacatagctgaaggtagaatggctgttcggtatccgaagaacagggagaacacgaaatatggctttgactctggcatcagcagcacgtctgctcagtgagtatggattgctgcgcgaaatcatccaaggagacgactggacgcttgacgcgcaggccgtcaacggattcgacaagccattcggttcaatcacctacgacaccaggcaggtcgtatctaacacgctcctatgctgcaaaggccgtttcaaagcggaatatctcgatggcatcgatgatcgcggtcttgccgcatacgttgcggaaaacgatttctccgcggcgacgaaagctccgggactcatcgtgaatgacgcgcgcaaagctatgagtctgctgtccgcggcattctatgggtacccgcaggaccaactgaaagtcgtcggcattaccggaaccaagggaaaaaccactaccgcctacctcacgcaagccatgctcaacggctgctccggcggcaaatgcgcattgttctcctccgtcgacaattgccttgacggacatacctatgccgagtccgatttgaccaccccggagtccatggatgcgttccgtatgatgcgcgaagccgctgataacggcatggaatacctagttatggaggtttcgtcgcaggcgtacaaagtcgatcgtgttttcggacttactttcgacgtcgccgcattcctcaatatcagcccggaccatatcagccccatcgagcatccgacattcgaggattacttccactgcaaacgtcagatcgtaaagaattgtcgttccttggttctcggcacggcatgcgcacacgccgatcttattcgtcaggatgctgcaatcgccgatattcccatcaccgcgttcgctcttggcgaagcatcggccgcggatgtgaccgcatggccggaatccgccgaccatagccgattcgccattgcggtggaaggcgaacagattggatcgctcagcttgcaattggatggcgatttcaattatgcgaatgccgccgcagccattgccattgcgcatgccgttggattcgatttccatgaaaccaccgcgaaggaaacgctgcacaatatggaaccggtacgtatcgccggtcgtatggagcatttccacgatacgaagtcgaataccatcgccatcgtcgattatgcgcacaattacgcttccgtaacggcgttgctcgactatgtcgaccaacgctacggcaaggacgatcctgaagtcacgctggtcactggatccgcgggcaataaagcgtacgatcgcagatcggaaatcgtcagggccgcgcagaatcgcatcaaccatctgattctcaccttcgaagacacggatgacgagcctgtggaacacatctgccaagacatgctcggcagtgtcaccaatcccgatctggatgcgaggatcattctcgaccgtacggaagcagtggaatcgaccgtagtaatcgatcgcaaggatcccgaccgcctccatatcatccttatcatcggcaaaggcaacgagcgctggttcaaagaccacggcaagcatattcccttcgaaggcgacgaccatattgtgaaacgtatttttggacttgcctgacctgcagcaacagccaaccatcatcgagtaatcaccagccataaggaacaatccaacaatcatgatcactcttgaattcaccgacgcagccaccatggaacagcaggctgtgcaggcgggtcttaccctgcccatcgaacagaccgcggtatgggccaaataccagaacaccattgacggacgtacgccgtggggtgcgtatgtggtgaagcaggacggcgctccaatcgcattcatcgcacttatcgattacgaaacccatggctaccactatttgaggtccgttcatggtccggcttggcttgacaagccttccgcgcagctggaagcacaggttcgtgacctgcttgttgaggacgtacgcaaacgcgataaaaacgttgtgttcctgcgtatcgacttgtggaatttcgagggctcgttcccggtgctttccaccgttccttacaacgagaccgtgtatgtggacatcaccggtggcgatgaggcgattcttacacgcatgaagaagcgtggccgccgcgacgtgcgtaaggcgttgagggagagccccgccgtttgcgccgatgagaccgcgcaggcgatggctgatttttccgaatactacgaggtcatggttgataccgccaaccgtgacggattctcccccgctccgatgagcgactatgtcgatatgatcagcaatcttggtcctgatcatgcgcgcgtattcgcggcacgtatcgacggcaaggttgtggcatggtccatcgttaccatcaacggcgatcacgcggtctattactatgcgtgcatgcgtacggaaatcatgcgccagcatgttcccgacaagctgatttacgttatatgctgcacgcttggcgagcaaggttgcacagtgctcgatttgatgggtatcggcaacgatttcgcgccttcattgaagagtctgaacggattcaagacgaaattctccgaaagcatcgcacagatttccgcaggtcgtgacattccggtcaagaaggcattctaccgttcgctcacgctgctgcagtcgctgcgtcgcaaactgcgcaagtaataatcgcgcctcacgacggatagcgcgaaatatcgtacgaaggaggatgcagcgaatcgatatcgccgcatcctcctttgtattgcatcatagatcgttggatcgatggaccgtcgacaacaaccgacgatccatcatcgccatgcatatatgcgattaccgcacatcttcagaagatgcagcatccgcatgctcaacttcggaagcatcagcatcttcatcttcagcaagatccggaccgacactgccgaaatcgttgatatcgaaatcaggattggcatcggattcgaaatcgagatccgcctcgtcctgatccttacgcggttccggctcaacagcctcctggaagacacgttccgacttcggcttcttcaaatcgggattgaccttctcttccagcatgagacgcgcatcgccagccgtagtgaagctaccgcaaatcagcacaccgtgaccatagccaacaccaagctcatcatcggcgtcaaccatattaacagcctcctgaatggcatccggcagttcaggaacacacgtaaccctttccgcaccaaacacgcgctcggcaatctttttcagatcttccgcaggcatcacacgatcacgccacgaattctccgtaacgatcacatggctcaacagcggttcgagcacgcccaaatactcttcgacctgcttgtctcccatcatggcgatcacgccgacgagttgctggaaatcgtaattttcctcaatcgcggcacgcaacgattctgccgcattcacattatgcccgccatccagaatgatcgttggcgatgtgcgaatctgctcgatgcggcctggaatcctcaccgtgctcaacgcctcagccacaagatcaccgtcaagcgcaccgttgacgggaatcaccacttccgccgcgcacagggccgcgagcgcattatgggcctgatgttcgccgaatttggcgatcggcacttccgcgtacgtgccattcggcgtacgcagggtcgcaacctgaccgccgactgccggaatgcgggtcacaacttccgcttcgatgccatccctcaccagattggcatggttctgcctcgccgcttccttgataatcggcatgacggcctcttcatgcggttgacgcccgatgaccgcgatgcagcccggcttgataatgccgactttttcggatgcgatctgttccacggtattgccaagccatgccatatgatccatgtcgatcggtccgataatggccgcatcggcatcgagcacgttggtggcatcccagcggccgcccataccgacctccacgatggccacatcgaccggagcgtcggcgaacttccagatggccatggcggtgagcacttcgaagaagctcatttttggcttgtcgagttcttccatcttcatgtcgaccatggctacaaggtctttgatttgatcccaggtatcaacgaaatcgtcgtcggaaagctgctggccgtcgatggcgatgcgctcgttgacatgttcaagatgcggtgacgtgtataaaccggttcgcatgccgtaggcacggcagatcgcctcggccatgcgcgcggtagatcctttgccgttggttccggtgatatgaatcacacggaacgactgctcgggatgtcccatgatgtcgaggatcatcttcatgcgttgcaggtcaagattggtggtattgcgctctgatgggcggctcatgatgtcgcgttcgacgtcgatcatgctttcattgttgcgattcggatgttcgaatgacatattctttcggattcctcccctaccttgggattgctcactcaatctctcttattctatgtgcttgcatgaacgttgcgcggcgcaaaaagttataggatggtttgcggtaattgcgtaagcatggacaaccatattcaggagatgtgatgaacgaagtcattaccgataaagacaaggagtatgaagccatggagcagtccagcgctcccggccctgatcaggcgatgagcgaccgtgtgaacaatcgttcgctgcgcccgcgttccgaggcgttcaaggagttcatgaccaccggttgggatgataatgagccggctattgaaccgttggaatcttcccattacattcaggctcgtcttgacacgctgggtaaggcttttcccggagagcgtattgtgatcccggccggtcagccgaaggtgcgcaacaacgactgcgattatgcgttccgtccggatacgacgttttcgtattacaccggtttgggtgaagactacgaagccggtgccgtgctggtgttgaatccggttgatcccgattctccggaggctgcggccggcaagacgcatgtgccggaattgtttgtggctccgcgtgcgaaccattacacgcaggactttttcatgaatgcccattatggcgaatattgggttggacctcgtgccggcttgcaggagatgactgcaatgaccggtattgagaccaatgacattgcgcagttggctgacgcactgagcaaggatgtcggttctgaagctggtgccgtgcgtgtgcgtgtgattcgcgaggctgatccgcagatcaccgaaatggtggaggatattcgcgaggcgaacggtttcgccgatccggatggcaatacgcatgccgatgacaagcttcatgagtttgccgccgaggctcgcatgtgcaaggacgaatatgagattcgtgaaatgcgcaaggccgttgccgcaaccaagcatggtttcgacaatattctgcgcaagctgccgtcgtcgctcgacaagcctcgttcggaacgtatgctggaaggcgcgttcaatgccatttcccgtgaggaaggcaatgaggtcggctacgatacgatcatcgcttccggcgctcatgcgccgattctgcattggatgcgtaacaccggtaccgtggagtccggcgatctgctgctgattgatgccggtgtggaagtcaatagcttgtatacggccgatatcacgcgcacgttcccgaccaacgggaagttcactgatttccagaaaaagctgtatcaggcggttttggactctcagcaggctggttttgaagctgccaagccgggtgccacgtattccgacattcatcatgcgtgcatgcgtgtgatcgccgagcgtctgcatgattggggcattcttccggtcgatgtcgaggagtcgctttctccggaaggacagcagcatcgccgttggctcgcctgtggtgtggcccatcatcttggtttggatgtgcatgattgcgctcaggcacgttatgagtcgtatcagggtgctgcgattcgtcctggcatgattttcacgattgagccgggtctgtatttccgtgaggatgatctgttgattccgccggagtatcgcggcatcggcattcgcgttgaggatgatgtgctgatgactgaggatggtccggaatggatttccgccggcattccaaagcagatcgatgaggtcgaagagtggatggccagcatggctgccgaaggtgcaaaggcctgatatgccaacgcctgaattcattctcgagttacgcaagaaagtcggtcacgatctcctgtggctgatgggcgtctccggctatgttgaagacgagcaaggtcgtgtgctgcttggcaggcgttccgataccggcgagtgggccatagtgtatggcattaatgagcctggcgaggaacctgccgacacggtggcgcgtgaggtcaaggaagagactggcgtggatgttatcgtcaccgatttggtgtcggtgaagtcttcccgcaaggtgcttacgtatgcgaacggcgacaacaccatgtatatggatcacctgttcgtgtgcaagcccgatccgaatggtaatgccgaaccgttcgtaggtgacgaggaaagcctcaacgtgggttggttctcccctgatgacctgcctcgccccctggccgacaccacagtggaacgcatgggctacgtgcgtgagtacctcaagaacaaggcgaacggcgacgcacacgcgcaattctccttcaacggtgcgattcgctgaatacagtcacaattgaatatataaactaagagctggtgtgacgctcatgaaccgtcacaccagctcttgtgcatgtcaggaagccacgaaactcacttcggaatcaaattcctttggcgagcaactcgtgcagctgggcgcgatgttttcgctgttcacgcggatcaggcaccggcagcgatgccaacaacttctgcgtgtagggattctgcgggttattcataacctgatcggcatcaccatgttccacaatctcgcccttatgcatcaccataatgcgatcggccagcatatcgaccacggcaagatcatgggtgatgaacaggcatgcgaaacctatttccgcctgcagtttcttgaacagctccaacaccttcgcctgtaccgacacatccaatgcagaagtcggctcgtcggcgatcagcaggctcggcttaagcgccagcgctcgtgccaaggaggcacgctgacgctgaccgccggaaagctcatgcgggaaccggttcatatatgcacgcggcaactgcaccatttcgagcagatctcccacatagtcgctcgcttccgacacagacgagtactttttatgcacgatcagcggttctgccacattctccgcgatggtcatcagcggattgaatgaactacccggatcttggaacacaaaaccaatatcagcacgcttgggtttgaattgacgttccttgacaccgttcatttccacacccaacacgttcagggagccgccggacactttctgcaaacccgcgatggcacgaccggtagtggatttgccggaaccggattcgccgaccaatcccagcacttcggaacggtgaatagtgaaatcaataccattgaccgccttgaaatcaggctgcgtcaaatgcccaggataggtgatagtcagtcccttggcctcgacggcaatgggttggtcatgccaatccttgctgcgttcaatcaccttgccctgctcatcacgaacgaccagtttctgcccgatacgcggcacggccgcgagcaaccgcttggtgtaatcgtctttcggcgagtagaagatctgttcgacgcttccctgctcgaccacatgacctcgatacatgaccaccacttcatcggcgatatcggcgatcacacccatattatgggtgataatcagcacggaagcgccgaattcgtcgcgggcaagacgcaacaagtcaagaatttctgcctgcacggtcacgtcgagcgcggtagtcggttcgtcagccagaatcagacctggattgagcaccaacgccatggcgatgacgatacgctgtttttggccgcccgagaactgatgcggatagtagtcaattcgagtttcggcatcaggaatgcctacttttttgaggatatccacggacttggcacgaagctccttcttgtctttcatgccgtgcgcgcgaagtccctcttcgatttgccatccgatggtgtacaccggattaagtaccgaattaggttcctggaacaccatggccgcttctgatccgcgcatacggcgcagatcttctccggaaagagacagtacgtcaagctgctcattgccttcacggttcgacagataaatcgcgccggaagtggttgccgtctccggcaacagcttgataatcgaacgtgcggtcacggattttccggaacctgattcgccaaccacacccaccacggttttgcgtgggatggtgaagctaatcttgtcgatggctttgatggatcctgcgtcggtcatgaaggaaacgctcagatccttgacttgcgcaagattggtttgttcgtcactcattgcgtcactcttcttccttggagccccattcggaggcggtaaatgacgggtcgcgatccgtaacggtcactggctgatcgctggctcccattggattcttggcggccgcgagctcggctatcacctcgttgcgaacgcccggcttctggctgggatcaaccgaagtatcttcgatggatccaaccacctcaccagcggatttgcgtgcacgcagacgcgggtcggcaaggtcattgagggattcgcccaccaaggtgatacccagaacaatcaatacgatggcgatacctgggaacactgcggtccaccaaatgcccgcggttacatccgacacggaacgattcagatcgtaaccccattcagcggctgcggtaggttcgatgccgaatccgaggaagcccaatcccgcaagagtcagaatcgcttcggacgagttcaacgtcagaataaccggtaacgttctggtggagttcttaagaaggtgcttggtcatgatgcgccatgtcgacgcgcccaccacgcgagcggaatcaacgtaagcggattccttgattcgaatgacctcggatcgaatggtacggaaatactgcggaatatagaccacggtgatggagatacccgaagcgagaatgccactccacagaccagactgaccgccggaaatcataatggccatcagaatcgcaagcagcagcgaggggaaagagtagatggcgtcggcgatcatgacaagcacacgatccacccaaccaccgaaatatccggaaaccaaaccgagcaatacacccgcgaaaatagaaagcagcacagcgatcacaatcgcaatgaccgcggtacgagagccccaaatcacacggctgaacacgtcataaccacctgcggtggtaccccaaatatgctcggatgagggtgctgcctgggccgggaatgaaactccattggcatctttgagctgcgcatagccgtacggtgcaattacgggcgcgaacaaggccacgagcaggaagaacgccgtgagcaacaggccggtaatcagcatgcctttctgccagccgaccgctacgcgaagctccttgatgatcggaatcttggcccagaacggagctttcctgttgactttgagatcgttcagacgagtgtcacccgggacggtgacgttatttgctgatgcagtcatgtcagtacctcactctcggatccaccaacgcggcgataacgtcaacgatgaagttgacgacggccacgatgatggcgatcagaatcacaatgccctgcacagctacgaagtcacgcgctttcagatattgggacaacatgaatccgagtcccttccattcgaaggtggtttcggtaagcaccgcgccggcgagcatcaatgcgatctgcatgcccataacggtgatgattggaataagcgccggcctccatgcgtgcttgctgagcagacgtttttcggcgacgccacgcgaacgcgcagcctcgacatagccggaattgtaggtggaaatcacattggtgcgcaccaaacgaataaacacgcctgcggtgagcaatcccaacgccagcgcaggaagtacggcgtgacgcaacacgtcggccagcacgctcatatcacccaactgcagtgcatcgataatgtagaagccggtcggagagacgagtcgggtgaactgcatttccgaagacaacgagcatcgaccggatgccggcaacacgttcagccagatggcgaaaatgagtttcaggaccaatcccaagaagaacacgggggtggcgtagcacagaatggcaaaggttcgaatgcctgcatcggcagcgtgatcgcgtctgcacgcagctacacgacctaagccgatacctacgatcaaagcaacaatgagcgataggagcgccaactcgaaagtcgctgatccgtaatgaacaagaatgctgataaccggctgattatcagtcaacgtagtgccgagatccccatggagcaaacccccaaggtaatcgatatattgcacaataagaggacggtcgtagccggccgcatgaacacgcttttgcaactcgtcaggggtaagacgaccacccaatgccgcagaaataggatcgcctgtagctcgcatcacaaaaaacacgacggtgacgagaatgaaaacggttggaataatgagcaggaatcgagtcaggacgaaacggaaaaatccgcctgacaaatgattctttttggcttgtttcggcttcgcctcctgagagacggccggagctgctgtgtctgacacgcgatgctccttgataagaagcctgtacggctttgatttacaacaatatcgaatcactgcgccgtttcaggcagataattcgggaaatggggacctccggccatagaccggggatccccagtggttttctatgcaggctgcggcaggtcatgccgcacatccgcacacatcacgccttggtgacagatgcgaaacggaaacggaaggaagcgtcgagcacaacacccttcacgttggcgccggtaactgcaacctgcgcaccctgcagcagcgggatggtggacaggtcttcggtttcaagggtctgaatcttcttgagcagatcctcacgggcgctttcgtcggtttcaccagcctgctccataatcaaatcgttgatttcggagttggagtaagcgttgttcacgaagttgccgtcacggaagaacggagacagatagttatccgggtcggagtaatccgggaaccagccgagctggtagaccgggtaggatccatcagagtcctcggtaacaacacggtctttgttgtactgggtccattcggtggactgcaggtcgaccttgaacagaccaccctcctcgagctgagccttgagagccgcatactcgtcggcggaagaggatccatagtggtccggattgtactgcagcttgagctcaaccggagtggaaacgcctgcgtcctcaagaaccttcttggccttgtcggcgctcggcttgccgttgccgtcaccatacgcggtcttgaaggtgtcttcgtgaccaactaaaccgtccggaatgtaggagtacatcggggtgtacgtgtccttatagaccttggtcgccaactcctcgcggtcgatgaggttagcaacggcctgacgcacagccttggccttgtcggcattcggttcgtcggacttggtgccgtacggctggatgttgaagttgaagaccaggaagcgttcctcaccacccggacccttgacgaccttgaccttggaatccttggacagatcatcgatgtcggtcggagtcagagaacggtaggccacgtcgacctgtccctgctgcacggccatcttcaggttggaagaatcggcaaagtacttgacctgaacagtgctgttcttggccggggtcagaccctgataagagtcgttcttggagtagcctgcaacctcattggccttgtaggaggtcagaatgtacggaccggcgaaagccttctccttgatgatggtgtcagcatcagtgagcttgtcggcggagaagacctcttcgtcgacaatcggaccagccgggctggaaagcacctgcttgagggtcacatcgttcttgactttggaatggaacaccacagtggtgtcatctggcgtatcgatggattcgatgttggccagcaacgaactcggaccattctcatcgttgatcgtgttgacacggtcgaaggagaacttgacatcggacgaagtcaggtcgtgaccattggcgaacttcaggccagacttgatcttaacggtgaactcagtgccgtcgtcactccaggtaccgtcatccgcagcgatgtccggagacagttcagaggtgttgtagtcctgcgcatacaggaacgggaacacgttgatttgaacggcataggaaccgttgtcataggagccggcagggtcaacgctagtaaccttgtccgtggtgccgacggtaatgacatccgcatcccccgatgcggaaccgctatcctttacgccgccgcatgccgcgagcgaggccagtgcggcaatcgaaacagccgcagccataatcttcttgtgattcactatggaatcctttctcttcctgctgtcgtaattggtactccaaaacgacgtgccataagggtagggcacactttgttagcgaaacatttcacggaagctcattttgcgacatcaccctttctcgatccaacgaaaactcagcaatcacaacggttttgcagttaattttttttcgaaaagagtgtgtcaaataatgagacagcgaatcccatattgagaatcgacggtcctcgtgacacgccgaaagacggaacttgcatcaactaattaacggcgttaatatatcaactagttcaacgaagggtccgtgcactggcgcaaggaggtgtcatgagtagttacagcgctcagcaatcatcgatttcagaaaacaatcgttccagaattctgcaatacctctaccacaacggcatcagctcacgtgcgcaaatcgccaaagccatcgaactcacacccgcggccattacgaaaattaccgcaaaactactgttccgagacgttatcgaagaaaccggagacatggaaggcgataagaatcgtcgttccatcggcctgaatctcaattgcgcgaaataccatgtcgtcggcgtgaaattcgcacgaagtctggtgcagatcgcagtgttcgacctgaaatgcaatcgtatttccctcaccgacctgcccaccgttgacgaggagcatattcccgaaacggtagaacagatccgggccaccgtacgacagctcattgcggacgattcgagcatcgtagccgtcggcatggccgttcccggtccgtatctggtggaggaaggtcgcaccgcgctcgtctcatccatgcagggttggcggcaggtcaacttcatcaaggagttcagcgaagcgttcaacgtacccgtattcgttgaacaggacgcacgcgcaggcgccttggcgcagttcctgttcaacccggaactgtccgagggatcgctcgcctactatctgcttggcgagggcatcggcctcggcatcatcgacaatggttcgatctattacggcgcgcacggcacggccaccgaaatcggacacatctccgttgacgtcaacggcaagccttgcgactgcggcaatatcgggtgcctggaacgttactgctcagccaacgcaatccacgaacggctcaacgaacagccgagcattgtgcccggatgcgaggcaatgacgcacgcgcaggcatgcaccgcgctgttcgccaaagctgcggcaggagacaaagcggccatggatctgacttccgaggtcgctcgatatatcggatatggcgcggtcaatatcatcaacgccttcaatccgacgcatatcgtactcggcgacatcatctcccaagccggacagcccttgcttgacgaggtcaaaaaagtcgttcgggaacgtaccatccccgaagtcgggcacgataccaaaatcaccttgtccaacctcccaacggacgccaccgtcagcggtgccgcggccgtggccatcaccaattttctggaacatccttcgatgttctttgacgtcgcatagcacgccacaaccaaagaaaggaacaccatgtccaagccaatcgtcatttctctcggcgaaatcctgtgggatatgctccccaccggcaagcgtgccggcggcgcacccgtcaatttcgcataccatgcgtcccagaacggcgcggaaagcttcgccatcagcgccgtcggcaacgacgagctgggtaccgaactgctctccgacgctcacaaggccggcatcaacacgctggtgcagaccaacgaatacccgaccggcacggttgacgtggccctgaccaacggcattccggaatacaccatcgtcgaaaacgtggcttgggaccacatcaagctcaccgacgagctcgtcgaagccgtgtccaaggccgacgccgtctgcttcggcaccttgggtctgcgctcccccgaatcccacgacaccatcgtcgaactgctcaagcacaccaaggaaggcgctctgaagttcttcgacatcaacctgcgtgcgaacttctactccaacgaactcatcgaagaactgctcggctatgcgaacatcttcaagatcaacgacgaagagctgatcatgatgcgcgacatgttctccattcctgagtgcaacgacgaagaggcatgcaagtggttcatcgaccgcttcgaccttgagtacaccattctgaccggcggcgccacgttcagcaccatcaccgccaagaatggcgaggtttccacgctgctgacccctcacgtcgaggttgccgataccgttggtgcaggcgactccttctccggttccttcaccggcaagctgctgagcggcgcaccgctcagggaagcgcatcgtgcggctgtgaacaccgccgcctacgtgtgcaccaaggaaggcggctggccaacctaccctgtggaaggcgttccggattatctcgccgaagccggcaagtaagcccagattttccttttcatcatcatcaacgaggccatgtctgccatcatggcctcgtttttcatacccatattcaatccgcaattggtgcaatcacgattgtcacgatatacgcacctcaacgaagaatgatgccatgaacgacaccagcaacaccacaaacgccgcttcacaatccgatattccgcagtcagtttccgatttcatgcggcatatcaccgacttgtgtggcggcgaacacgcaagatgggccgaaaacttcaacgcaggattcgccaatacactcaccaccaccgtgagacggcatgatgacggcacgacgtttctgctgacgggagacatacctgccatgtggctgcgcgactcctcagcgcaattccgaccatatctcgccgtagccgtagatgatcccgagctcaccgcgcttattaccgggcttgttcggcagcaattcaggttcatcaatatcgatccatacgcaaacgcgttcaacgaaacacccagcggcgctacctgggatccgaacgatcagaccgattcgttcggaccatggttgtgggaacgcaaatacgaggtggactccctgtgctaccccattcagctggcgtggctgttgtatcgcaatacaggaaccaccagccatttcgatgatgcgtttgtaagcggcatccgtcgaatccttgacgtgttcgaaaccgagcttgaccattcgaattcgcattaccgcttcttccgtccgaacgacgatccgcgcgacagcgtgcccaaccatggtaccggaggaccttttgccgtcaccggcatgacatggtccggattccgccccagcgacgacgcctgcgtctacccatatctcgtgccgtccaacatgttcgccagcgtggtcatgggatatgtgcaaaggattttcatcgacgtgcttgacgatcgtgaaatcgccggtcgtgccgcggcgctgcagcattccatcgatgatggtcttgcccatcacgcaaccatccgcaatgcggccggaaacgctatctacgcatacgaagtggacggtctcggcaacgcgttgcttatggatgacagcaatgtgccgaatcttatgtcggcaccttatctcggattctgcgaagcggacgatccgctgtatctcgaaacgcgcaatactttgctgagtcaggagaatccttactatttcgagggtgactatgcacatgccatcggttctccgcatacgccagaaggttatgtttggccgatcgccatggccatgcaaggattgacaagccacgacaaagccgaaaaagaacgtattcttgatcaacttgtcgccgccgacgccggcacgcatctcatgcatgaaagctttgacgcgaacgacccgaactcctatacccgtccgtggttcagctgggccaatatgatgttctgtgaattggtcatggattatttcggtattcacgtcaagctgtgagtggctatcagtttaagctttggcttcgctcacagcgcaagaattacggtagatgatttgcacttattgacattccatgatatcttgaaaagtccggtcttgcaccgggtgcttgataattcaagattggggatgatcggtttcgacggtgacctgttcgtcgcagggaagcgtgccgagaacgtagggtccgctcgtggatgccccctacaaaagaataagtgctaaatctaaccgcactgagttcgctctcgctgcctgagcttcgcgccaggattaaccagtgagcagccgctccgttcactccttctcgtctttgggaggatgctgagcgtcgtttagaagacttgctttgtcgactgagccacagggccggcaagggacttttactgtagatatgcccgccatcagttgtctgcgatatcgatgggagcagaaaaaccgccgcacggccagcagactacgcacgtagaagactgagggttcggttatcggaccggggttcaattccccgcatctccacaagttgaaagccgccagaaatggcggcttttcttttatttccaacggttttcgaagattcctgggtttactccaaattacccccgatgtgccggatattctaaaaaatgtgggcaaaaatccctcctccggcttgcttaatctcttccaaattccatctgtctaccaccctaaacagcatgcaaggtacgtttttaggtactcctcttcacaagacaacctcgtcaaatcaacatacgaaaaatccagctctcccccatcacaaatcatcagaatcccaccatcaaattccgcgtgtcgacttgcattaaccgcttaagtgattaacatagttaatacttcaacctagttatcacgtcacagcagacgatgtcaaggaaggacttgatcgatgacctgcacttactctcccgaagcctacgtattcggctccgaagaaaaccatagcctgctcaatgcggaaaccaacgagctcctgcatttcggacacaacttccccgccccgcagggtggctcctattggctggacgacaacggcaatccagatctgacccaaagcatccacacgtggatcacctgccgcatggcgcacgtgtattccttggggttcctgcacggcgagccgggcgccgcagaactggttgacaaggccatcgccggcctgcgcggtccgctgcatgacgatgaaaacggcggatggtatccgtccatttccgcagacggctccacacatgaagcaggcaaggtctgttacgctcacgctttcgtgattcttgccgccacttccgccaagcttatcggccgtccgggcgctgacgagctgctcgaagaggctctggcaacttacgacaagcatttctgggatgatgagatcggcttagccgtcgatacttggaacacggaattcaccgagcttgactcctaccgtggcatcaacgccaacatgcacaccaccgaagcgttcctcgccgtcgccgatgttaccgacaacgaggaataccgcgaacgtgcgggacgtatcatcgaccatgtggtcggctgggcagccaacaacagctggcgcattccagagcatttcaccgccgactggcagccggacctcgaatgcaaccacgacaagccggatgaccagttcaagccgtacggagcaaccccaggccatggcattgaatgggctcgtctcatcacccagtatgcgctgagctccaagcagcgttccgaaaaaggcaagcagcagcttatcgaggcagccgaaaacctgttcgtccaagcactttccgacgcatggaacgccgaaggcaccattggcttggcctacaccaccgattggaacggcaagcccgttgtcaccgaccgcatgcactggacgcttgccgaatccgtaaacacctcggccacactggccaccgtcaccggcaagcaggtgtacaaggattggtatgcgaccttctggaagtacattgacgaatacctgatcgaccatgagaacggttcctggttccatcagctgaacaaagacaacgaggtcatcggtaccgtctggccgggcaagtccgacctgtaccatgccacgcagtgcacgctgattccgcgtctcgatcccgcggtctccgtcgctcctgcgttgaaggccaatccgaacgcctgacggcctccaataatcgaatttctccttctctcctcctattcgcgaagaaccccggtaacgcaggacaaccggggttcttcgtatatcaacgcactatttgataattggacgcaacggcgcagacacgtcgacgttatgcttgtctccgatcacattcggatcattgataattttatcgacgacagctttcttcaacttgaggccggatgaatcgccccatacgatcacgcggtctcccccattgatttccgtggtgatggaatcctgggtttcggcagtcaccttggtgatggagttgcgcatcgattccggcaatgagctgaggatcttcaacgcctccttgatggaacgattgctcaaacttgtttcgacatccttcacttcaatgacgggaattccgtccacggaagctccgctgacggaattcaatatacgccccttgctgtcgaccgcggtcatgctgtcctcgcctgtcttgagcatcgcagcaggcttttgcgccttgatggtcacttcaagggagtcgggcagttttttcttggattgcgcggaagtgactcccggaatctccttgattttcttttccacgtcattgtccgacacgagaagaatcgattttcctgcttgctggcccgcaatatccaacacctgagactcactcacccattcgttggcgccgacaacgctaatagtgccggactcgagacggaacaccgatgagaagaaaaacagccataccaacgcgcccgcaacaacaatgacagcagcggaaacgcacgcgcgcatggcgacgacacgcgcgttcgccttgcgtcgttctttcagacgcgcactgaaatcaaccaccttcgggcgcgttaccacgcccaacgtgcctgtggtttcctccaatgtcttcgaaacgaaatcctcgccggcaagattgcgcgcgtctacgaaatcgcctgatctcgaacggctcacgctgcctttgttgccactctcaaccgtattttcctgcgtcttcttcccggaagaagacgcgcgtcccgctccaccagcgacggaacggcctttcggctgaacctgctttccggcatcgctgtgtttccggctttggatggttctaccatgcaacgtctgattttcaggcgtcgttgcggaaccatccgaacccgtacctgaactgatgacccttcgcgtcatcagccctcacaatcccaacgatgagcctgaagggagtgcagcatcacctcgtccatctgtgtgatatcgcctgcgccaacagtgaagatgacatcgccatgatgagcacgcatcgtcatcatctgtgccgcggtatgcatatcctccactccgcgaatccaatcctcggcaggcgtgtggtcaagcttaagcgcctcgtccacaatggtggcggagctaatcgtcggatagtcctcctgcttttcacgtgcggggaaaatgccggtgacgatcacatcatccgccttggccaatgcttcagcgaattcactcgcaaagaacatggttcgggagaacaggtgcggctggaagatcacgcgaatcaccgactgcgggtacctacggcgcgccgcatccagcaatgccgaaatctccgtaggatgatgcgcgtaatcatcaacgacagtcacttggctgaccgtaccacgcacttggaaacgacgggcggctccaaggaacgacgtggcggcttgggcagcgttctcgacatcgacgcccaacaacgcggccgcaataatcgcagcggaggcattgcgcgcgttgtgaatgcctggaacggtaagcgtcaccggaaccatacgctcatgttcgctcaacaatcccgcgggcatgtgtaaggtgaaatgttcggcaccgctttgcgcgctttcgctttccgattcgacatgcacgaacgcggcaccgttcaaatcacccaacgaaaccgcattctgcgtcgcatacacgaccgtacgcttggccgtctgcgggtcgagagcacgcaataccgcaagattgccttcatcatcgccgcacatcaccaccgatttttcggcatgctgaacatgattgacaaaagccgcacgatagttttcctgcgtgccgtaatggtcgagatgatcggcttcggagttggtgacaatggcgatttccggatgatacttggcaaagctgccatcggattcgtccgcttccgccacaagaacgtcgcccttaccagcatggcctccgtcaagcgtcacaccatccttgccttggatggatccgccgatggcatagcttggatcggccagatttccctcaccggcatgggtgaggatatgggcaagcatggaactggtcgtggttttgccatgagctcctgcgaccgtcaccgcacgttttgcgttcatcagcaatgcgagaatgtcgctgcggtgcacgatgcgttcgcctgcttcgtatgctgcgacgatttccggattgtcggatttgatggcgctggagaatacgacggtatgtttgccttcgacgttttctgcgcgctgcccaaattcgacggtaatgccgattccctgcagacgatcggttttggcgctgggttcacgatctgaaccgtccacttcaacgccctgttcgtgcagcatttcagcgagcacgctcatgcccgcgcctccaatgccgatgaaatgggtggcccccaaatcattcacgccttcctgcggactgaacgacgcatgggttggatcaagaacgatggtaccggcttcacgctggttgtcagacacgactgctcctcttgcatgttttttctagcttgttccattatggtctcacccatggtctcgcatatggccgatcatgggtgggattttggaacgcggcgaacgcacctgccgtcgccgcagcctacttttcgtcaatcatggaaagcacgcgcttggccatgacttcggcggcatctcgaataccgtattgccaggcgttgtcgccatacttggcaagcagatccgaatcggcaagcagcttcggcacatgctgtttgacccattcggcggtgaattcgcgatcggccaccatcagaccgccttccgcatcgacgacaggctgggcgttgaatcgctgctcgccgttgccgattggcagcggaacataaatcgcggggagtcccaaagccgtcaattccgatacggtgccggctccagagcgacagatgatcaggtcggcgcaagcgaatgcgagatcaatacgttccaaatacggcgcaacacgataatcgccatcattgccatggtccgggccaagctcgccaagcacctgttcgccggcgctcaccgacaccaatgaacgcacttcatcatctttgcctttcccagtcagatgaatcacctgggcgtgttccagcagctccctagcggaagccgccaccgcacggttcacgttcaccgcgcccagcgaccctccagtcaccaccaccagtggacggttcggatcaacaccgagttgcgctgcggccgattgtcttgtggcaatgcggtcatgttccatgccatgggctatcgctgcgatttcggcacgcaatggcaatcccacacgctcggcttcaacacccttgcgtggcttcaagccggtttgcgcataggcggtgccaatcatggacgcccagcgagctcccaatttgttggccattccagcacgggcattctgctcatgcatcgcgatcggaatgcccatcttgtgcgctgccgcatatacgggagcggacgtgtatccgccgaagccgacaaccacctgcgcctcatgacggatgagaatgtcacggactttggccgtttcggccttccactgcgcgggaaacttcagcgccgccatattgggcctgcgtggaaaaggaaccttctcaatggtttccagttcgaaaccggcctggggaaccaaatcgtgttccaagccgacggcagtgcctaccactgcgatatcggcgtccggttcaagctcgcgaatcacatgcgccacggcgagcagaggattgacatggcctgcagtaccaccgccggcaagaacgatatgcttctgattgctcatagtgtacgagcttagcccacggcaccccagtacgccgcgcgccataccgtcgcacgcgcggatgctcacatttcatctacgtttgcacaccgcgatacgcagtagcgtatgctgcggtcgcaaccgacgctcagacccgctgcatctccgcttggatctgcggctgctgcttcatcatgctgatggtcactcctgcagcgcccaaacacagaatcaacgacgaaccgcccgcggacacaaacggcaatggcacacccatcaccgggaacaatcccaccacaacgccgatgttcacgaacgcctggccaacgatccacacggtaatgctggccaataccaaagtgatgtacctgtcctgcgattgcgaagccaccacgagcatgcaccatccaagcaccaagaacagcagaatgacgagagaggctcctacaaagcccgtttcctcaccgatgatggcgaaaatgaaatcgttgtgcgcttccggcagatatccccatttttcttcggaattgccgatgcccactccaagcaaacctccggaggccatggcgtatttgccatgcaccgcctgatagcagaccccctgcatgtcggatgcggagcaagtttggtatgtggccatgatacggccgagtcggttcggactggtgataacgagtccgccaactaaaaccgcaccgccgcatgccacgatagccaaccatttgccaggaaaatctcccaacagcaacgcggcacctgcgatcgcgaacagaatcatggccgttccaagatccttgccactcacaaccaacagcaatgcaagaccaagccacgcaatcaacttgagatatgccttatatggtccgactttgtttatctgcttctgcgcgtagatcagttcccgcggcagccatatgcacaacgcaagcttaacgacttcggcgggctggaaggtaaatccaaaaaggccgatccaacctttgttgccttggacatcgatacccaagggggtaaacgtcagcgactgcaaaagcaaagcgataatcaggaagacgaaactgaatttcctgatgagctccgccggaatcatcatgcaggcaacacccacgataagtccaagaacgcagaatcccccctgtttcagtgcttggaaccacggagactgtccgttggcaatcatgtttaccgaagagctggaaaacaccatgatcacaccgaaaatggtgagaatgatcaccgcggttctgaacccatgaaaacaccaaatcggattaagcagacttcgcagaccgacataaccatgaaaatcgtcgacctgctctccgacggcggccttttttttctgacgactactatcaacctgcctggttttaggcttttccatgctcgttcacccaacgctgagcctgctgtgcgaactggtttccacgatcggcatacgacttgaactgatccatcgacgcacatgcaggtgccatcagcaccacatcaccggattggacgtactcgcccgcggcatcgaccgcccgttccataatgaccccattatccgccggatcgatgatggtcagaggaacgttgggagcgctcgtcttgaacgcatccagcatcggttgctgatccctgccgatgatgaccgcggctttgatggtatgcgcctgatcagccaccaattgctcgaaacggctgcctttggccagtcctccggcaatccacaccacggatttatcggcaaaactattgagcgaggccttggccgcatgcgcattggtcgccttggagtcgtcaacgaaacgaatggctcccccatccgccgtagtggcggtggcgacggtctggatacggtggccacctggagtgaactgcttcagggatgcgatcgccttctccttatccgtgccaagtcccaataccaacgccaacgcggtcaacgcgtcggcgagcaaatgcggatatacagtgccatccggctcggtcagatgtgtgaactcggcaactctggcaacctgttcaggcttgcccgcttcaccgcccgcgaggccggacatgtcgacgatccagccgtccttcacgccaatctggccatcttgcggttccgacaatgtgaatccaaccctacggcagccttccgcggtttcggcggcgaatgccagcttggtcacgcgctcatcatccgcgttgtacaccaacgccttcttggcatggtggaagaccttcgctttgtcggacgcgtaattgtcgataccgccatgccaatcaagatggtcgtcagcgatattggtgatcgccgcgcaatccaactcaagagaatcggtgaaatgcaattggaaagaactgagctcaacacacagcacatcatttgccggatcgactgcggcatgagacaccgctttgccgatattgccgacagcaggtgcggtcaaaccgcaagccgtcaacatctccgaagtcatttccgtagtggaggtcttgccattggtaccggtgatgccaatccattgcgcaggatgcccagtggcatcgcaatccacccgcagctgccaggcaagctcgacctcgctcatcaccggaatgccacgacgttgcgcttcgagaatgaacggggtcctcggattgaataccggagaagtcatcaccaagtcgacatgatcccaatcaatgtggtcgaaagagtgcaaatcggcatcaggcttcttctcatccacgcccaacaccttttcggcgcgggaacccaacacctccatcatgctctggccagaaactccaagacccgccacaatcgcggtcttaccgctcatatccatatccatcatccttcgatcgtcagaacctcatacgccttaatatcacagtcatattgcgttcattcgcaacggcaacagaccgagcatcgactgtcacaagccggaacgggcaacccaatcgccatagaaaagcaccaaggcgaccagcacgaacagcagttcaatcatccagaagcgaatcacaaccttgacttcgggccatcccttcaattcgaaatgatggtggatcggagccatcttgaacacacgcttatgcgtcatcttgaaatagccgacctgaatgacatcgctcaacgtttccatgacgaacaggccgccgagaataatcgcgaggaattccgtatgcgtggcgatggacatggccgcgaacaggccgccaagcgccaacgaaccggtatctcccatgaaaattgaagccggattggagttgtaccacaggaacccgaagcacgctaccgccgcgcaagccgcgataatggtcaaatcaagtggatcagataccgcgtaggtaaagccctcatgccccgaccccttaaggtggtagaactcccaaaaagcgatcaccgcatatcccatgaacgcaatcatcgaagagccagctgccaaaccgtcaagaccatcagtcagattgatggcattggtccacgcggtcatcaggaagttcacccaaatcacgaacagcacgatagccacggccttacccgcgaattcgaaactgaagaacggctcctcaatgaagctcatgccggcctgggcactggggaaaccggaattcgtaggcagaatcaacgccagcaccgcatatatggtagccagaatgaactgaccgatgaacttgcctttaaccgtcaatccctcgctctgcttcttacgaaccttcgcgaaatcatcaataaaaccaagcaatcccatcgacaacatggcaaacagcaccagcaccgcagaccacgacggagtctcaccccgcgtgacgaagcggtacagcgccgacgagccccagcccaacacaaccgccaaattgatgaccacgccacccaacgtaggcgtgccacgcttgactagatgggatttcggaccatcctgacgtatgtattgcccataattcagcttgtgcaccaaacgaatcagcagcggggtgcccacgatcgtcacaaccagcgacaccacaattccgatgatgagcgaaatcacctgatgttctccgtttcagtcagacattcttcagataacgtcgtttattcgattattcgaatcttgccaaatattcttgttctattgtgcagccagggcctgccaacgttcggccaaagcactcaagccggaagcgtgggagcccttaagcagcaccacagcgcccggatgttccacggcgagttgcgtcaccagacgatcggcctcgtcaatgtcgtgcacccaatcaatatgggaagcacatcccgcagcggatgcaccttcagccatggcaccggccagagcgtccaaagaggcatcggatgcgctgccgaccgtcagcaacgcgtcaacgtcgccttccaccgcataccggccgatgccagcatgcaaatccttttcatccggaccaagctcaagcatggcacccaacaccgcaatacggaatggttgggtctcagcatccgccttccaacgcaacaatccgtcaagccccgccttcatggaatcgggattggcattaaacgaatcgtcgatcaaggtgaacgatgtttcaggcttgtgcaccgtggaaacagccatacgatgaggactgatggccgtgacgtcagacagcgcggacgcgacctcatccatcgacatacccaaatgcatcgctaccgaagcagccgccaacgcattcataacgttatgctgaccgcaaatgcccagagtgacctcggcatgctcgccatcaccattgtccaaaatgaagctcggatggtccaattcgtcgcaatgcacatgttgcgcgctgattgccggcttgccgtcattgttctgcggaagtccgaaccacatcacgtcgcccggagcgatggcgctcatcgcagccacatgctcgtcattcgcgttcagtacggaaagaccacctggaacaaggccacggatgatttccgatttggcttgtgcgatgcgttccggcgagccgaattcccctagatgcgcgacgccgactttcaacacgaccgcaatatccggcggcaccagcgacgtcaaattcgcgatttccccaacatgattggcacccatttccgcaaccagaaagcgagtttccgcatgtactttgagcgaagtcaacggcagtccgatttcattgttgaacgatccgaccggcgcaatcgtcggtcctatgtgcgccagcaacgccttcatgagatccttggtagtggtttttccgacggaaccggtgatgccaatcaccgtaaacggcgtttccaacgcacgccggcgttcgatattgtgcttggccaacgcacccaaggcaagcaccgtatcttccaccacgatctgaggcactccggcaccgtcgatctcatgatcgactattgcggcaacagcgccctgagcgcctaccttcgacacataatcgtggccatccacgcgttctccggcaatcgccacgaataccgatccttcaacaatctgtcgtgaatcagtgaatgtgctggtggccacaggcgtatcaatcgccgcggtgccggcaatcagccgtccctgaaccgcctgggcgatttcctccaagctcattggcatcatggtcgggctgctcactctgatttctcctctgtgttgatgtactgcatattgttcacgttgtttacgattatcactattcgacgtccgcatccgttccgatcgagactagttcagatctcgagatacacgcaatgcgcttttaatattggccttacgtacgccggccgcaagcaccatggcgatggacaatgacaacgcgctgctgtccgcctgcccgtatgcctccgccgcttgcgctgcgagcgcatcggattcctgcgtacgacctgcgatgtgggtctgcttgccgacagtgcatccaaaccgtgcgaccgacttgacgatctcagcctcgctgagacccttgtcgtcgcagccaagcacatcaacattcaccgactgcaacgcatcgtcattcaacgtttcctcgctgagcgcaaggatcacagcggcggcgccgtcttcggcgcacacagccatcgtacgctgcacgtcaagaatcgacaatggatagttcagatcaaggaatcgttccaacgattgcgaattgccggcactaatcacgccgaccggattgccgagcatgtgcaggaaatccgcgagatccctcacaccctgttccaccgtttgcgtattgctgccagccacggcgaacaccgccagcgaatcggatgggctgcccgccatctcgctggcaagcttgcccaactgttgcgcagtcggttcggcataaatcaaaggaatctgaacgccatccgtttttcctcgcaacgcatgcggcaccaccgcaccatacgcaccaagcgcttgcacctgccgtaactgttgctcatccacctgcatggacggcatgaacaacgctcccggccgcaccgaatcgatgtcgtcggcaatggacgtgaccgtcacttcggtagcgaacgcgggatcaaggtcaaagccatatctgctggcaagcagacccaacgtcattcgcctattcatggattcgctgaccgcgctcatctttccgcccctccgttcttcatgctcacacactcaccaagtcactggaatagcatcagttcgcggacttgacgccggcacttcgtacttctgcataaggaattcaccaatctccgcagtgaccgggcctgccgtcagaccaccataactgccttgcggatctttcaacaccaccgtaacgacgaaacgaggattatccgcaggaataatcgcagaataatcgctgataatcgatgacagacgtccgtccgcaccggcaacttccgcggtaccggactttgccgcgacacggtaaccatccactttgacgaactgggaatagtggtcggacacggattccatggcattcatcacctgcgaggccacctgctcgtcaatcacgcgcgtcgcttcgccttcaggcttctgctcttcggaatgcccttcggcatcgctgatcgccttgatgatgcgctgcggctttttgacgcccttgttggcgatcacggcaaccgcgttcgtcaattggagcgcattggtcgtatacgcctggccgaacagcacggtgttctgggttcgcagatcccattgatcggccgaatacagcagaccatccgcttcgccgggaagaccaagcccattgtcttgtccgataccgaatttgctgatgaactcatatcgctgctcgttagacatcttctccgcggcgatgatcatgccgacattcgacgattgctcgagaatgcctgccagcgtccaatgctcatcgccgtgggtcgtcgcatcgctgtaggtctgcccgttcgtcgtaatgtggtccggcaccgtgaatttatccgatgcctggtgcaatccaagctgaatcatgcctgacatggcgaaaaccttgccgatggaaccgggttcaaacgtttcgctgacggccctggaaaccgtcattttcgcctggtcgctgccggcttcgatttcgtcgctatcggcgagcgcgagaatgtcccctgtttgtgtgtcctgcaccacggcgattccccacggtgtactatatttcgtgcagctttccttcagcactttttcgacgtaccactgcacgtcgtggtcgatggtcagtgtgacatcggatccgttgaccgcgtcttttgattcggtcatggttccggggatttcgacgccgttgttgccttgttggtagacttggtacccgtcttcgcctgtcaacgtcttgttttccatctgttcgaggcccgctacgcctttgccttcaccgtcgacacctcccagcagtgcgcccatcagggttccgttggaatagatgcgttcgttgctgagttccgcgtagacgataccgcccagattgagtttggagatcttgcgcttaacggccggcgtcacatcttttttgagtaccgcatattggcctgttcccgaaagcatggcacccaattcggtggcgtccatgtccagtactggagcgaggagtctagctaccgccgcagctccggtagcacctaccggcttgccatcgatctgatggcagttgtctccggtctgtttggtgcaggttgtgggagtgaaggcctgtgcttcctcggggttgccgatgatggtgtagcgttccacgctttgcgcgagaatcgagccgttcgtgtccatgattttgccgcgccgtgccttcaaagtcacggtaatcgtgcggctttgcgccgcggcctgcgccatggttttgccattgatcaactggatgttggccaattgaataaggcaagccgtgcccatcaacgccagaatgacgccgatggccatggttttcgtaagcagtttcttatggaaacgtgcgtaagtgcggtgaaaaggattcactgagcgtcgtctccgcttggctggtagccgttcagatcaatcgttagagcgcctttttggggcaccatgcccatttcctcggccttgctcggcagcgaggcttcaagttcgtcaagcttggcctggtcatcttccacgtcttgggtcaggcgggtaatgttcgactcaatctggttcgcctcgaaggaatgctgcaccatttgggtacgcagcgttaaggatcccagaagacatccgccgaggaacaccacggcgataaccagatgcaacaatggagtgcttctggtgcgcgtccatgtgatgagctgttcgaatcctcgcttgacgctgttgccttcggcgcgcattcctttgacgacgtgcaattcagggcgagtggtgccagcggtttcggtttggtcccggcgtcctgcgggagccgcgtttgatgcgatcgttcttggtgcggccacgttcagcccctccttccttgtcgtttcatgcttgcgtaatcattgccttggtcgaatcgttttcgccagcgttcaggaattggtctggtcagttccactgcgcgcagtcgcacagaggccgaccttggattcatggcgatttcttcctcggccgctttgatggcgcctcgcgtcagttctttgaagaacggcatcatatccgggggtattaccggcatatctgcgggcacgtcagctttcagaccttgattcataaatgttttgacggtcttgtcttccagcgaatggtacgactccaccaccaaacgtcctcccaccgcaagatggttggcgatctgcggtagcgtccccgccaatttgtcgagctcgccgttgacttcaatacgtaatgcctggaacacacgtttcgcgggatttcccgcaggacggtgcgcttgcggcacaacctcatccaccaatcggttgagctgccccgatgtggtcaatggttcgatctcacgcctacgcacgatttcgcgggctatctgcttggagaagcgttcctcaccatatgtacggaaaatgcgtaccagatcagcgaacgaatattcagcaagtatctgttcggcggtcaatggctgggtcacgtccatacgcatgtccaaaggcgcatcgtgagaataggagaatccccgctccgtctcgtcaatctgcaaactcgacaatcccaaatccatgaacacggcgtttacctggtcgatcccctgatcatcaagcacttgcgcgaaatcgtcgaatgcggcgtgcacgggtatgaagcggtcggcaagaccttccatccgcattcgctgcgtggcgagcgaaagcgcctccgtgtctcgatcgatgccgatcagacgcgcttgcggactcgctttgagaaaagccgtggaatgccccgccaaaccaagcgtgcaatccaccgcaatcgaccctggcctcgccaacgccgggaccaccagatccacgcagtcgcgcagcaacactggctgatgtatggtcgttacatctgtcatcagaattccaccgccggtaatacgtcatcggcaatatcggaatatccctgctcctgttcggcgagatattcctcccatgcctgcttgttccaaatctccgctcgggtccccacgccaatcaccacgatgtcgcttcccaaattcgcgtaatcgcgcaacatctgcggcacgagcacacgtccttgcctgtctggctcctgatcaaccgcgccggaaaggaacacacgcaaataatcacgtgcagccttgtttcccatggatgtgcgctggatctgcaatgcgatccggcgaaattccgattggggcaacagatagacacatcgctcctgaccacgggccatcaccatgcccggtcccagctggctgcgaaattttgcaggcaatgccatacgtcctttggcgtcgatttttggagtgtatgttcccaacagcagcggaggcagtccagccatcacaccgctcgcttgcgtcgaaccatcgtcggagaagggctcggtttcaacgctttgaaccatcgccacacctccttacatgatgcgcgggaacacctagacccaaaactctttccccactttaccccacgcatcaccataaatccccacataaatggaaaaaaacagcaaatgctgaggttgattttccccacattgaacgaatggcatcaaatcaactaccgtaaattcatccttgcttcgctatgtcgcactcgccctcgtcggttttcgtagaagcctcggggtacattggagtgcctaagttttgtgaggaagggattgcagatgtcgagttattccgcccagttgcgtgaagaacaacaggccgtcagccgcgcgtacggccgcttggatgatctgcgggcccaagctcgtgcccgtctcgacaccgtgcgtgctgccggctcgcacggatcgcccacgcaacgcaccgaacgcgattccttcgccaccatgtacgaggatcgcctcacccagctgcgtgccgtcgaagatcgcctggtgttcggcagactcgacgatgtccacggtgcgcacagatacatcgggcgtatcggactgtccaacgaaaaccacgagccgatcctcaccgattggcgagccgacgcggcacgtccgttctacgaagcgacgccttccaatcatggcgatatcgtaatgcgccgccatatcacactcagcttccgtgaagtggtcggcgttgaagacgaggtgctcgatgtgcactccgaccaggtcgggcaggcgtcttcggacggcactctgaccggcgaaggcgcgctgctcgcatcgttgaacgccaagcgcaccggcaagatgaccgatatcgtggcaaccatccaagccgaacaggatcgcattattcgcgccgacctcaaccaagccgtggtggtgcagggtggaccgggtaccggcaaaaccgccgtggcgctgcaccgtgcggcatatctgctctacacgcatcggcgaatgctcgaacgctccggtgtgctcgtggtcggaccgagctcaaccttcctgcattacatcgatcaggtgctcccctccctcggcgagaccggagtggtcagccgaaccatcgccgatctgatccccggcgtgatcgcgacggcgcatgacaacccgttcgccgcgaaattgaagggcgaacgtcgtatgtccaaagccatcgccaatgccgttgccgcacgagaacgcgtccccgcatcattgccgtcgatccgcatcaacggattcgcagtgcccatcgtgcgcgcggatatcgaacaggccatcaccgatgccaagcgcacgcgacagcagcacaacaaagcacgcgaaactttcgtgcatagcatgttgatcgccatgcgcaaccgttatgtggacaagcttgattacgagccggagcaggcggagttgacggatgtgatgcagcagttgcgcatgaatgacaccttgcgcaagacgttgaatctcgcatggttgccgatgaccggcgaatggcttatcgaccaactgttctgcaagccgcagcagcttcgtcgcttcgcaccatggcttgaggaacgcgatatcgaagcattggttcgtcccaaagggtcgccgtttaccgtcagcgatattccgctgctggatgaagccatggaactgcttggccccgaccccaaagcggtcgcccgccaaaaggcgttggacgccaagcgcgccgaggaggagcagttcgcgcaagatacgctggctcaggctggcatcggctccggcatcgtcacttcgcagatgttggtcgacaatatcaacgggatggacgcggaactcaccgcgcagcgcgccgccgcagaccgtgaatggacatatgggcatatcgttgtcgatgaagctcaggaactcaccgccatggattggcgcatgctcatccgccgttgcccgtcgcgttcgttcaccattgtgggcgatgttgcgcaaacctccgcattgggcggcacccgttcgtggcggcgtatgatggatccgttgttcggaccccacaattggcaactcaacgaattgacgattaattaccgcaatccgaaggaagtgtcgcagctcgcctgtgatttcgcggcaacggagggattgtacatctccaccgtcaatgcggtgcgtggcgtgccggattcggtcaagcgcctcactctggccgacgacagtctgattgccgatgccgtggcacagcagaccgtcgatctggtccgcgcattcgtctcctccgatggcaccggacgcgtggccatcatcgcacctgacgatatggtcaagccgttgcgcaggcgggtgtacgaacagcttcgcgaaacattgacggcgaaggagttcgaccgtctcgatgcgcagagctcttgggatgaacaggtcaccgtttgttccacgcaaatggtgaaaggcttggaatacgacgcagtgatggtggtgcagccgggaagcatcgaggagaatgccccctcacgcattgtggccgcagccgatttatacgtcgccatgaccagaccgacacaacgtctgcttatagtccggacaaatgcagacgaaaaactgctcaagctataaggtaggaaccatgcctaaagcattgttacttgaaaatattcatcctgacgcggcacagtcactgcgtgaccacggcttcgaagtcgagtgcctcaggggcgccctcaacgaagatgaactcatcgacgccttggaagacgttgatctgctgggcattcgctccaaaaccagcgtgaccagcaaagtcatcgacgcacgtccgacgctcacggccgtcggctgcttctgcatcggcaccaatcaggtcgatctcgactatgcgggcaagcacggcatcgccgtgttcaatgccccatattccaacactcgctccgtggtggaactggttatcggcgacatcatttgcctgatgcgccgcattcctgcgcacacccatcatatgaagcacggtatgtgggacaagtctgcttccggctctcatgaagtgcgaggcaagacgctcggcatcatcggctacggcaatatcggatctcagctttccgtcatcgccgaggcacttggcatgcgcgtggtgttctacgacattgaagagaagcttgccatgggcaatgcccatcgttgctctacactgaacgaactgctcgaacagtccgatgtggtcacactgcatgtcgatggccgcaagtccaataccggtttcttcggtgaggaccagttcgcgcatatgaagcaggattcgatcttcatcaatctttcccgcggttttgtggctgatttggacgctctgaagaagcatttggactccggccacatttcgggcgccgcagtggatgtgttccctgtcgagccgaagaagagcggcgacgagtttttgacgagccttgcggatgaagacaatatgattctgaccccgcatattggcgggtctacgcttgaagcccagaagtccatcggacagttcgtctcacagcgtcttgaggattattggttcaggggatccaccatgttgtccgtgaatcttccgcagatcacactgtctgatattcgttcgaacttccgcatcgcgcatcttcacgcgaatttgcctggcgtacttgccaaggtgaaccgtgtgctcggagaagagaatatcaacatcgcggcacaggcactgggcaccgaaggcgaaatcggctatgtggtcaccgatgtggcccagcgccccagccagaaggctttggacgaactcgcagccatcgaaggcacgatccgtatgcgtgtgatcagctgacgatcccaatccggcaaacgccactacgatacgaatgcattgtgggggttccaatcacttattggctggaacccccacaatgcatgaaccctaatgccgtttgccgtaatcgcccagttttgcgctaccaagtccatttcagccaaaacaaacgcattatcatatgcgttcgcaaccgttcgaacctacttcagcgcatcggccttcagctcgtcgatcgcgttctggaaatcctcaagattctcaaaattctggtatacactggcgaatcgcatatacgcgacctcatcaagatcacgcaacggtttcaaaatggccctgccgacctcgtcggatttgacttgagccagtcctcgggcacgaagatcctcttcgacctgctggccaagagccttcaaatcgtcttccttgatcggacggccctggcatgccttgcgaacaccagaaatcaccttgttcctatcgaactgctcaacgttgccggaacgcttcaccaccaacaacatagtggtctctagcgtggtgaaacgcttggagcatttcgggcattcacgcctacggcggatggaatggccgtcatcgctgatgcgggtatcgaccaccttggtatctggattctgacaaaaagggcaatgcatggtgtcaagaatagcctgaaccattgaactaggccaatcttgcgcgggttcatacctcgtcgggaacgataagtctttgaccggcccgaagcgatactgaatccagattattcagtcgtaccagctcgtccacagtatccgcaacattgccaccatcaggcgtaatacgcgcagcgtacccccacaacgtatcgcccggctggacggtatataccaccaccggcgtcgctccgggatctgactgcgcgcgtgcaggcatcatcaatccagccaaacaccatgcgagcaccatcagcatcatgattacggccagtcgatccgcccagactttgaaatcaacgccatgagccttcggcacacgatccatcacgccactccttctcgaacagctgttctatcgaacgcatgttctgagtatggcacaaatgttcgataattgcagacacacctcgaacagatgtttgattttctcggcgtttcgcgttatgcttgcctaagacctgaaaggagcccaccgtgagcaccgtcccattcacgcccaaaaaggatgccgagcgtccggatgaaagcacgctgaccgaccgtcagcgcaaggtgcttggcgccatcaaaaaacatctcgtcgagcaggggttcgctccctcattccgcgaaatcggcgaagccgcagggcttaaaagtccgtcatccgtcaaacaccagttgcaagtgcttgacgacaagggcttcattcgcatgaacgcgaacaagggcagagccatcgaagtcgtgagtttcgacgatgacgaggtttcgcccggcaaagtagcgcaggtcatcccattcccgagccaatctgattccagcggatccatcatggcttcccgcgatgtccccttggtgggacgcatcgcggcaggcgtgcccatcaccgccgagcagcatgtggacgatgtgatgcgtctgccggaacgtctcactggcaccggcaatctgtttatgcttgaagtgcatggcgactccatgattgacgcggctatctgcgatggtgattttgtggtggtacgcgagcagaacaccgcggaaaatggagatattgtggcggcgctgctcgacgatgaagccacggtgaaaacgttccgcaaggatcatggccatgtctggctcattccgcacaatcccgcctactcccctatcgatggcacgcatgctgagatcatgggcaaggtggtcaccgtgctccgcaaaatctgacgttagactattcaacgccattgaaatcgcgcccacaaagatgaagccataaacaaagactccatctttgtgtgcgcgattcttttccggtaaacgcaccggtcatttaagaatgtttaggaatgcatttcggatttgctggtcgaactgtatccttccggttcgagttggaaggtggtatgaggtacggatacggggaaatgttcgcgcaggcaatcttgtagttgtgcgagtatttccgccgcttctttcatggtgagtccttgttcgaccacaacatgcgccatgaagatcggcatgcctgtggatacgatgctcgcgtggatgtcgtgtaccgccacaacatgcggcacttgttccaagtgggaacgcacttcatcgagatcaagaccgttgggggtttcttcgagaagcacgcgaaccgcgttgcgcaacagtttgatggctcgcgggatcatcatgagtgcgatgatgccacctgccacagcgtcgaatccggcccagccggtgcagatgagcacgcttgccgatacgattacggcaacggaccctaaagcgtcattcatgacttcaaggaatgccgctttcatgttcatgttgtcttcgctttgcgatgcgaggataaagattgatccgatattggccgcgaggccgagtatgcccatgaagagcagcaatcgcacgtcgtttacttcgtcggcagatccgccgaaaagtctcatgccggcttccacaagcgcatagatacctacgatgaggaggatgagggctccgactgccgctgttagcacttcgagccttgcccagccccaggtgcgtttgttgctgggcttgcgttgcatcagtattgcggtgacggttgatgcgatgagtacggacatgtcggtgagcatgtgtccggcatcaacgagcagcgccaacgattctgtgatgaccgcgctgatgacttccgctatgaataccgtcgaggtgagaccgagcgacatcatgagccgtttttgatgttccgctcctgtgttcgctatcgatccgtgcgcgtggtcatgtgccatatgcttaatctttcagcccgattaagaaacttattgaaattgtttctcaataccattttcattgctctcaaaacgcaagaaaccccagccataggccggggtttcctttatttctttttgcagtctaacgactgatcaatcgcctgtcaatacccaagcaaccaaaaagcggtaacgcagctggcactccgttaccgccagaaaacaataaaaaacgcggtaacgcatgtgacagcaaggcgcacggaatgaaggcgtacagaggtacgtcgaattccgtgtaacgcagctagcactccgttaccgcgtttttatcagaagccgaactgggcagcggtttccttcagcgtctctgcggaacgcgtaagggctgcaagctcgcggtcggacaccggggtgttgatggcggtgttgacgccggaacggttgaggagggtcggcacggacatgcagacgtcggagatgccgtggaagtcgtggagcatggagctcaccggcaggatgcggttggagtcgcgcatgacggcttcgatgatgtcaacgccggacatgccgatggcgtagttggttgcgcccttgccgttgatgatcttgtaggcggcgttcttgacgtcctggtgaatctgctcacgaacttcggcgtcgagcggagcgtgacccggcagcggggtccagtcgcacatcgggacgccaccgatggtggcggaggcccacagcggcacttcggagtcgccgtgttcgccagcaatgtaggcgtgcacgttcttgacgttgacgccggtctgctgggcgatcaggaagcgcagacgtgcggagtcaaggttggtaccggagccgaagacctggtttgccggcaggccggagatcttctgggcaacatgggttgcgatatcaaccgggttggtgatgagcatgtagatggcgttcggagcgaccttcacgaggccaggaatgatggccttgagaatgttgatggtggcaccgaccagttcgagacgggactgacccggcttctgacgcggacctgcggtgatgacgatcatgtcggcgtcgcggcagatttccggatcatcggagcctgcgatggacacggtcgggaagaagctggagccgtgctgcatgtcgagtacttcggcttcgacgcgttccttggcaatgtcttcgagcacgatctcacgtgcgacgccacgctgagcggcagcgaaagcgagagtggagccgactgcaccggcaccgatgatagcgagctttgtgggcttgattggtgaatccaccatgtgcttacctctcttataagaaagaatgtcccgctggtagcaggttttctcttagaatttcatctttactttatccacacagcatgacgtttcaaggcgttataacacgacttgcaaataatgaaaagtgatatgcatcacaaaagatgtgagcgctcacaaacgctgtgttcgttgcgttgcactgttttgcaaggttttcagccgattgactgttccacgatttgcgcagccaaatgatcgtccacttccgcttcgagcatcataccgtcgtcacggtattcgacgttgatcactttgccgtattcacgtacgcgcgacaccagcgaaccggcagtgtatggcagcaacgcctcgacatgcacgttcggcgtcggcagcatggattccacctgcatacgcagctcgtcgacgccttcgccggaaaacgccgatacgatgtacgcttccggcatcaacgcctcgatacgctcgcgtgtggcctcatccatacggtcggccttgttgaacacgataatcgtgggaatggtttcgacgccgtcgatgtcggaaagcacatcgtcgaccgcgtcgatttgcgagaacgggtccggatgcgatccgtccaccacatgcacgatcagatcggcttcggaaacctcctccagcgtggatttgaacgcttcaatcagctgcgtaggcagtcgacgcacgaacccgacggtatcgacgtacgcatattgacgtccatctttggcacgcgccctgcgcactgcggtgtccaatgtggcgaatagcgcgttctccaccaattccgctgatccggtcaaccgattcgtcaacgacgatttgcccgcgttcgtatatccaaccacagcaacggtcggcaatccgaaacgacggcgagcgccacgtttgacgtcacgcgcgggagccatctgttcgatctgtttgcggagtttggcgatgcggcttcggatcacacggcggtccatttcgattttcgtttcgccaggtcctcgcgagccgatgcccgcgtctcctgcggcgcggccacctgcctgtcgcgacagtgatccgccccagcctcgcagtcgtggcagcatgtactggagttgtgccagttccacttgggctttgccttcgcgtgaggtcgcatgttgggcgaaaatgtcgaggatcacggcagtgcgatccacgaccttcactttggtggcgtcttccaaggcgcggcgttggcttggcggcaggtcgtcgtccacaacgatggtgtcggcttcctcttgcgccacgattccggcgagttcgcgggctttaccggagccaacgtatgtagctgcgtccggcttgatacgatgctgcagcaggccgtcgcataccacggcgccggcggtttcggcaagcgcggcaagttctctcaatgattcttcggcctgtgcctgtgtggtttcacggctggaccacacgccgacgagcacaacgcgttcgaggcggacttttcggtattcgacttcggtgacgtcttgcatttcgccgagtccggacacatgcttcaacgcattgcgggattcgcgttcctgccattgttcgtcatgggattcgttgaaatggttctcgccgttggtatcaagcagcacctcggactggtcggcgagcacgcctgacacgtcgttggcgctcatgctatgctcgatgtcgttttcttggctcaatggcacctctcacggttaaactatggtgtctttattatcatcattctctagagacatgggtatcgggcattcgccacgtggatgagcgcggcttgcgtgatgccggaggcgagcgtttgcaaggagtgggtatggcacaggccgaacagtatttcgcggctgatccgcagtcgaaggatgtacgtaagaggctgcatgttgtgttgcgaggcaatgaggccgatgttgaggtttccaatggcgtgttttccggcaatcgcgtggatttgggaacgtccgtgctgcttcgtcaggctccggagcctcctgaggagggtacgttccttgatctgggttgcggttggggcccgattgcgttgacacttggttttgcttcgccgaaggctgatatttgggcgttggacgtgaatgaacgcgcgttggatctgacgcgtcgcaatgccgagctcaatggtgtgaggaacgttcatgcggtcaccgccgatgagatcccttcggatatgacgtttgatctgatttggtcgaatccgccgattcgtgttggcaaggatgtgctgcatgagttgttgatgacgtggctgccgcgtttgaatgcgggtggtaccgcctatttggtggtgcagaagaatctggggtcggattcgttgattccgtggcttgccacgcagcttggcgatggttatgaggtaagtaagtacgcgagttcgaagggcttccgcgttatcgaggttatgaaggcatgaaattcgaatatccttcccaactgccggtttccgctgcacgtagcgatattgccgaggcggtgaagtcgagccaagtcgtgattgtgtctggtcagacgggttccggtaagaccacgcagctgccgaagattctgttggaattgggccgtggatcgcatggcaggcagattgtgcacacgcagccgcgtaggctggccgctcgtaccgtggccgaacgtatcgccgcggagatgggcgtgcgtttgggcgacgaggtcggctatcaggtgcgtttcaccgatgagagctcaccgaagacccgtcttcgcgtggtgaccgacggtattctgttggcgcagattcaacgcgatccgaaactgatgcaatacgatacgatcgttatcgacgaggcgcacgaacgtagtctcaatattgactttctgctcggttatttgactgcgctattgccgaaacgacgtgacctgaaattggtaatcacgtcggcgacgattgattcggtgaagttccaggagcatttcgagcacgctttgcatacgaaagtgccggttatcgaggtttcgggacgaacctaccccgtgcaggtcgtgtatgagccgctgggcaccgctcccgcgttgatgcgttccgtacccggttttgaaactggcgcgatgccgggcgatgccgactatgaaacgttgtcggccgctcctgacgcgaaggattcccgcgagccgaacgttgacatgccgacggcggtggcgcgcgcctgtgccgagttggtgattcattcgagtcatgaccgtggaccgcgcgatattctcgtgttcgcctcgggcgagcgcgacattcatgattttgagaatgcgctgcgccatcattatggtccgcgtgccattgatatgcgtcgtcctgatgcgattgagatcgtgccgttgttcgcgcggttgtcctccaaggagcagcatcgcgtgtttgagccgcatgaccatcagcgtattgtgatcgctacgaatgtggccgaaacgtcgttgacggtgccgggcattcgttatgtggtcgaccctggcaccgctcgtatttcacgttattcgaagagcgcgaaagtgcaacggcttccgattgaaccgatcagtcaggcgagcgcgaaccaacgttcgggtcgttgcggccgtattgcagatggtattgcgattcgcttgtattctcgcgaggatttcgagacgcgcccggaattcacggagcctgagattctgcgcacgtcgttgggtgcggtcgtattgcatatgctgtcggtgggtgtggctcgtaccgcgcaggatgttacggatttcggcttcatcgatccgcctgatatgaaggcggtgtctgatggtttcaatgagttgaccgagttgaaggccgtggcgcgcaagcatggcgaggttgtgctgacgcacacgggtcgcatgcttgcacgcattccgatcgacgtgcgtttgggccgtatgatcatcgaggctgcgaagtcgaccacgccgaacacgttggccgcagtgctggtggtggtcgcgttcctaagtttgcaggatccccgcgaacgtccggatgagaatcgtgaggaggccgaccgcattcataaccggtatgccgatccgtccagtgattttctgaccgcgttgaacttgtgggatcgcgtgttccaagctgatggcgagccgagcaattccgcgcttcgtaggatttgcaagactgagtatttgagttggctgcgcatccgtcagtggaaggatctggtcacgcagttgcgtgagatgtgcaaggaattcaagttcaaggttggcgatccgattccggcttcgcgtccgccgcttgagattcgtcagcttccgtcgaatcagcaggctgcgcattcgttgtgttgttcgtgggatgcgcagggtattcatacgtcgatgctttcgggcttgttgtcgatgatgggcatgcagatcgtgcgtgaaccgaaggcatctgatttcgctggcttgaagggcgctgcccgtgcgcgtgccatgaagcgtgcgcagaagatggcgaagaatgattatcagggtgcgcgtggcacgcatttcgcattgttcccggcttccgcggtcgccaagtcgacaccgcaatgggtgatgagcacggagttggtggaaacgagccgcttgtgggcgcgatattccgcccagatcgatcccgcttgggctgaaccgttggcgggttcgttgacgcgaaccacgtatgcggatccgcattggtcaggctcgcgtggctccgcggtggcgaacgcgaaggtactgttgtatggtttgccgatagtgcaggatcgtacggtgcagtggggtcgtatcaatccgctggaggcccgtgattttctgattcgtcagggtttggtcgagggcgatattcagcagcggttctcgtatgacgatttcattgcgaagaatcgcgatgtgctggaggacgccgccgacgatgcgagtcgcacacgtcagatggcgcaggcggtcagtgatgaggatctgttcgatttttataattcggtgattcccaatactgtcacgtcggttgcggatcttgcgaaatggtggaagtcaaagcatgatgagcagccggatttgttggattttgatccggagaaggtggagcgtcttgctgatgccgagtcagtgtcgttggctgattatccggatcattggcatacgttgggtacggacggctcccctatcgatttgcggttgagttatgtgtatgatccgcatgatccaaacgatggcgtgaccgtgcatgtgccgttgaaggtgttgtctcgtttgacaccggaacagttcacgtggaatgttcccggattgttggatgagttgattgtcggcatgatcaagtcgttgccgaagacgttgcgcgtgcagtttgttcccgctcctgatacggctcgtaagattcgtgcgtggattgatgagaggtatccggatctgcctggttccggtaaccagcagaagccgaatcttgctcctaccaatgcggagggtgtggccgcgtggccggatttgcctcatacgttcacgcaggcggcaatcagcattgttggcgcgcagattcaccctgaagtgttgactggtgaattgtggagcaagctcatgccgtatttgcgcgtgacgttctctgtggagcagcagttgcctccgagtcgcaagagtcagcatggcaggcgtcatgcgcggggccctgtcaaggtgcttggctcgggcaaatcgttggtggagttgcagcgcaagtttgcggagcaagccgaggcttccgcacggcagatggtgaagaagcaggcggaaaacgctggaaatcagggcaagcttgtggagcaggccaatctgctgcataaggctggtgccactaccgaagctcgttccaccatgctgtggcgcggtgcacttgatgttttgcgtatgccgagcgagcgtatttcgtcgcgttggttgggtgcggaggcgttgatgttggcgtccgcaccatatcagtccacgaaggatcttactgaggatctgcagttggctgcggtgaagcgtttgctgccgaatgttgacgaattgccggatgatgaggcgttggcgaatgcggtgcttgatgtacgtgaagtgttcgaagataccgtgtatgcggttgcgcatgatgtgatcgctattttgaagcggtatgcggaggttgataaagccgtgtcaggcaaggccgatctgccgatgttgagcgttttgcagtcgattcgtgagcatatcgccacgctggtgtatccgggattcattggtaagactcctccggatgcgttggcgccgattgaacggtatctgcatgctgacgtgcttcgtttaggtaaggcgaagaacgacaagaatcgtgatgtgcgttgggcttgggaggctgatgaggccaagcagttggccgacaaggccatggcgaaggccgaacgtgagcctgcaggtccgcgtcatgaggcgttgatgaagcaggcggtcaccgcacgttggatgcttgaggaattctacgtatcattgtgggcgcaggaactcggcacgccgaagccgatcagcctgcagcgcatcaagaaagcgttgagctaacgcatcatcatctttcgcattccattgccgtcgatacttgcggttttccagtatcgacggcaatagaacctaatgaaatcatcctcaatcgaaccatggttagcggtgtctagcgttgcttgaagaaacggaacaactgcgtttcatgtatcgtcataccgacgagcacgcttgataccatcactccagcgaatatcgcacatggcgcgcgcatcgcacccaaccatacggtcattgaatcggcgatgctcatgcgaacgcaatacgcacccaacagcgcggccgaagaggcacacgccaagccgctccaaatcaacgtttccacagcgatttccagcaattgcgcacctttggactgccctgaatgcaatgcgccagcatattccaatctacgacgacgcacgccgaacgcgccgaacatcagccccacagccaatcccagccacggcatccaacgagtcatacgctgcccgtacgaagcttgcgcatcgtaatgcgaatcgaaactcttattcacctgcgtcacgccggcattggatgacgaacccgacgcaaccagcgtggaaaacaacacatcctccgtctgcccgctttgcggccactgtctgacccaacattcgtcgaacgtgccattcgacgcagatacgggcacaaggagagcgtaggcgaatcgcgtgtcacgaccatcgttcggccaataaaacacgcctgcgacgctcatcgttccctgttcggtctgcattacgctgcctttggtgagaccaaaatccttggccacgtcggtagatacccacacgccggacacatcggacttcgcgctcccggcgatcatcctgatcatgccgggcgtcacttcatacgacgatatatccttgccgggcgtggcaagcggcacaatctgttgaccggcacgcatcgcaccggccaaggtgcccatcacaccgccgccagcgtcggcgagcctgtcacatgcggctccgtccaccgttcccccaacgatggcgccaacgtcggcataggcgttgatgcgttgcaccgcctcggtttcgagccccaccacattggcggcctcatatccgccgagcaatgtagacgcgaacaataccgctgcaaacataagcagcgcatgactcactcccgcgccaatattgcgcaacgcttcggaaagcaccgatcgtaatcgcataatcgcctactcgcaggtgagattgttaagtccgctgccgatttccacattggagatcgaagcgatgtcttcgctgtcggcttgcacgaggctcacgccaagttcgcctcccacgatcgacactttcacgggagtgctgccatgattgttggatgcgggcacgatgcagccggttgaaccgttgatgccgaataccgcgccggcgggaacgcgcagcactcgcatccgttcgctcaaggccaaagtggcgtcaaatcccgcttttctggattccacgtccacggattggtaactgtcgttcgcttcgacttgttgcaggaacccggcatccgtgatttcagtggtattggctggcaatgttcccgtaatgccgaatatcgtcaacgaacgttcctgcgcggatgcagtgccgtttttgatggtgagtttcgtcaatgatccggggattttgccgattgcggtgccgcccgtcaccatggatccggcggttgcgttccactcggcaactgcgacttcgtgttcgggaatccacaatgtgtcggccaatgacaacgatccatccgacgtattaccgttgtcggccatcaactgcttccacccgtccgatgtggcccacccgtaggtatccgatccgggaacgctgttgtagccaagtaagctgagttcattattcagggcgagcacatcgccgccgatgtctccggtcttcaaatcgcgatacaagggggttgcggtgttcaacgccactaccgtgcgatcgttcacctggtaggcgcctttgcctgagatcaggccgtcgccggaccagtccgcggtgaccatgccactcgcattgccggaaagatcacggtcactggaaatggtgggcaccacagtaacctgctgcatgcccgtatattcttgcacactggcgggagccacggtcttctccaccgccgagctcagtaatgtcggcgtgcggtcaggcagccacaatgcgcaggatccgaccgcaatacaagctgccgtgacagccgccagcagagtccaagtcacagcagtgcacttcgaacgcttaccgcccgtcctttgcctcattccgaatcgtcgcgtcatactcacatatacccattcactcacagccaacaagcaccatcagcgaacacatcaccataattcccctggaatcacttaccttctcaccacaactgttccgtatcgtcggtcgcatatcccacgttgtagccgttcgacacaaggcaactgcgcacttgcaggttctgcatgtcaaacgaagtattgccatccgttccggaaaactccttgttgaaccggcttacggtatagtccttcggcacgagcgagtctctatgcaaacaatcgaccacggcttgcgcttgatcggcatacagattcggattgcccacgataatgccgtacacatcctgcacatctgcaacatactcatcgccgcattccgtggaatcatcggaatatcgggattcctgaatggtcgtcccctgtttgtgtccagcttcggcatagagtccgctcggatatttgatgagtttgatttccttatatcctttgtcgatcatgcactgccggtaatcagaccaggctttctcataatccgacgtcgaaatctcacccgtacttttggctttgtccaatatcgttttctgcgattcagcgatattaccttgcgattcccgctgttcaatccattcactcaacgacgccgccaatttctgtccgcccgccgacccattttcggatgatgattccgatgtggcagaatcagaagatgcgcctgtggcatccccattaattgagcatcccgccaaaagcattgacaatgcgacggcaagaacgcaagtcttgcaaaatgacatccaagaagtcaccatcttcacccccgtactaatgtatcacaacgagtgtagcaccgcatgataatgtgcatagcaggcggcatttccgaaaaacttacttgcatatacgcaaatgaggtagggtggatgttgcgtggttgcgattaggggactacaaatgattggcaagggtgcatcggtaaggtgattgcctcgtgaaaggttggctatgcgcgttgcggttgaggggttggctcatcgatttgagggaaccgatctgctgttcgagaatttgagtttcgtggccgaacctggtgtgaccattgcgatatgcggtccgtcgggatgcggcaagtcaacattgctgtcgattcttgcaggatgggagcagccttacgctggcacggtgacgcgagaaggtgtggatcgtgttggatggatgtttcagaatccgtatggtgttgcggaacgcacagcgctcgaccatgtggtgtttccactgctcgccaagggaatgagccgccgcgaagcggaaccaaaggctttggaagcgatggaactgttcgatctggaatatgcggcagacaggcgtttctgcgctttgtccggaggcgaggcgcagcgtcttatgctcgcgcgtgcggtatgttccaggccgaacatgctgctggtcgacgagccgaccgcccagttggatacgcgtacatcacattccgtaagccatgtgctcggcaatctggccggtcaaggcatgatcgtgctggtggcaacccatgatccggacacgcgggacgcctgcgatcgcgtaatcgatctagccgactacgctccgcaagtcggcgggtccactgcccagcccgccaacatcgcagtccactaatcgctttccgcaatctcaacgaattacagataaaacttctataactttgccgctttcagaaaccgctcgttcaaacccgaccaaatgccatcaggcttgctgtttggcgtagaaatcgcgttctcgagctgcgaacgggcgcagcagggttgtggtgccaaccgcacacagcaggaagatcgcgcccacagggccaagccacatcagtcccaaatgggcgttgaccagtccaccaaccgcggagccgaccgcgatgccgatgttgaacgacatggaattgagcgatgcggccagattcagcgatcccggatgcgactgagaggcaacatccatatatagcacctgcgaggcggaattctgcagatacatgaacatgccaagcaccaccagcagcaacgcaccatacaccggcacccaatgcgttacgatcagcgatgccatgagcacggcgtgcgcgcagtagatcggacgaatatgcgtcagtggttccactcccctgccacggtcggcaagcttgccgccatacaggttgctccacaggcaggccgcgccgaaaatcaccaggccgacgcttaaatactgttcgggaacatgcacttcgtctcgcatgatcggcgtcagatacgtatagaacacgtaagttgccgccgcgccaaacaccacggcaagcacgcccaactgaatacgacggtcgaaaaacaggcggaactgcggcagaaaaccaatcttcacaatacggctgttgcgcggcaacaccatcaccatgagcacaataagcaccactgtgagcacgttcaccaaatggaacgcccaacgccagccgaacgtgttcgcaacccacgtgccaaccggcacacccaccacggatgcgatggagaagccggaaaacacccatgcgatgaacttcgtgcggtactgttcagttgttacatcgggcgcgtacgtcatggcaatggccaccagcgtgccggacaccagcgcgatgagaattcgcgccaccacgagcacgccataattcgacgcgaacgcgcacagcacgttgccgataaggaacaccccaaccagcgtcagatgcgtggcaaaacgcggaaaacgagccgacagcgccgatccgagcggcgtgaccggcgcatacacgaacgcgaacagcgacacaagattgccgaccgtcacctccgacaccttcaagccagccgcgatatccggcagaacgccaacgacaatgaactcgctcatgcccagcatgaaactcagcgagatcagcacaatcacaggcagattgaaaaaccgttccttcgccacatcactcttcgccatacacttctcctccatagcccctcgaactccccacgcctcgccaaactcgcattgtcattaaagcttctcacgtcaatcgattgacgaatcaatcgtcaaacaaacgataagccaaacgcgatacaatgacgcgcgatgacacgcaaaacaaccaccacagcaaaaaacaaccgcaaacccaagaaaaacaagcagccaagcctcaccaaactccgtaacgcctggaaaaaagcaaacaccccaaaacgcatcctcatagtcggcgaaacactgatagccagtatcgtcgcgctcgcgttgatcgttggattggtgcgattcgtcggttggcgtgtgcaagtggatgaagcggtcgcatcgcaggaacaattgcagacgcaatacgatttcaatccgggcaacatcatttcagatggtctgttcttcaacgggaacgcgttgagcgagcagcaggtgaacgccatcatcgaaaaacagggtgccgcatgcagcggcgagaaatgcttgaaatccatgacgtttagcaccgaatcgcaacccgccaacgaatactgcgaagcatatgagggagagccgaacgaaagcgccgcggcgatcatctacaagtcgggaaaggcgtgcgacatcagtcaaaaagtgctgctcaccgtgctgcaaaaggagcagcatctgcttaccgccaccgatccaagcgacttccaattcaagtcggccatgggattgagctgcccggacgacgcgaactgtgacccggaatatgcaggttttttcaaacaggtgtatggcgcggcgaaacgctaccagtattacgtgcaacatgaggatcgctatggataccatgcgggcacgctcaactatattcaatacaatccggacgccagctgcggtggcagcaacgtgtacatcgaaaacaaggcgactgcactgctgtacatttacacgccttatcagccgaatgcagccgcattggatgcgggagtcggcgaaggcgacgcctgttcgacttacggcaatcgtaatttcgcaatcatctacaattcgatgttcggctctcctcgaggctgatttttcgatacaattgctcatggaagggactgaccagaaggagcctttcatgggcctactcaacaacaacgactatatcgacccattcaagggttccgattacatcgatcccagcagcaacgccgaacgcctgtctaatcaggtgaaccgtgaccatgcacggcgtgaatcctatgtccagcggcgatatgtgaaacccgcgcagagcgatcaggcatcgcgcgacaggcaggccccacaaaacacccgatccaagcaagacggtagatctcaacaggcgcaaggcgatcagtccacacgaggagacacgctccaaaccatgttgaacgactggtccacgcaaaccatgcggtatgcccagtccatgcagcaaagcttgcaacaggcgttgcggcaaaatcagcaaaacccgcagaacccgcaaggacgcccatcgcagccctataatccgccgcgcatacaaacggaacgagccacacgcgagttccaatccacttccgacaagaagcaacgccgccataaaaacggcttcgtcaccgttttggagatcgttatcatcatcgctgtaatagcgtcgattggcggaatgctttctgacagcatgtcaaacatcatctccgatttcgatggatccacaagccagttcgaggagctgtccacacaggaaaccgtcagcgaagacgttggaaagctctactccaccggaggaaaagcattggaagtgaacatcgaaggcgtgcagacaggtccggaggatttgaacggcgacgccacgctcacggttttgctcacctgcacgaacatcggcaagaaaacgatgtatcctcatgccgtcgcagatctgatggtcatgcaaaacggcatcgagcttgcccctgcattcacttccaacgaggattccgaccgcacggagttctccggcgccgaaatgaaaccgaagaaaagctcgcagaccaccagcagtttcgttcttacggacaccaattcaccagttgtggttcagctgatgaattattcgcagcataatgttgttcgcgccgcgttttcctttgacgaagtcgacatagaaggatccttgaaacatattgattatgcggccgtccctcagcccgagcaagtggacgcttcgaatttcgacgaagacggatccgtaaccgattatgacgaaagcaccctgcatttccgcgtagactccattgagaagacaagcccctcatatgccgatcatgacatagcgttcgcacgcatatcctggtatgtcgaaaatggaagcaaataccgggctttcctgaactatatggatgtttccgcgacccaagacggcactgagttgcatagcacgtatcttgacgatgatagctattccacaacacgcaaggtcactcccggcgtgaaaatgacgacgacagtcgcttttgaaacgcaaagcaactcgcctgtgacattcatattttctgactatggtgatgagattcttcgcaaaaccgttaatttacggtcaattgagtcattggaactttaatccgatacttgcagaaacatcaaaagaagattcaaataatcattcggaaagcaaaagaccgttgttgcaatcagttttctcatgattgcaacaacggtctttgatgaaacgattgcggttcgcttacagcttcggcaggtacttcttcagttcgaaaggagtgacctgcttgcggtattcctcccattcctgacgcttgttgcgcaggaagtattcgaaggcatgctcgccgagcactccggccacgaagtcggacttctccataaccttcaacgcctcgtcaagagactccggcaatggctggatgcccatggcctgacgttccgcatcggtaagctcccacacgtcgtcgctggtcggctcgcccaactgcatctgcttgtcgatgccgtcaaggcctgctgccaagagcaccgaatatgcgaggtatgggttggcgaccgggtcgagcgcacggaattccatgcgggcggaattgcccttgcctggcttgtactgcggaatgcgcagcagcgcggaacggttgttgtggccccagcagatgtagctcggagcctcgttgccgccccacaggcgcttgtaggagttgacgtactggtcagtgaccgcgcagatttcagccgcgtggtacagaatgccggccgcgaactggcgtgcggtgacggacatgttgaattcctggcccgcctcgtagaacgcgttggcgtcgccttcgaacaggctcaagtgggtatgcatgccggaacctggagcgtcggaaagcggcttcggcatgaagctggcgtgaatgccgcgctccagcgaaatctctttgacgacggtacggaaggtcatgatgttgtcggccgtggtgagcgcgtccgcataacgcagatcgatctcgttctggcctggacccgcctcatgatgcgagtattccaccgaaatgcccatctgttcgagcatgttgacggtggcgcggcggaagtccatgcctgggctgcgcggcacatggtcgaaatagccgccctcatcgattggggttggcgtctgggaccaatcatcctgtctttcgaacagatagaattcgatttccggatgcacgtagaaggtgaagcctttttccttggctttcgacagagcctgcttcagcacatgacgcggatcgcccaacgacggctcgccatcaggggtaagcacgtcgcagaacatgcgcgcggtgccttgcgggcctccacgccacggcagaatctggaatgtcgacgggtcgggcttgacgatcatatcgtcttcggacacacgggtgaggccttccactgcggaaccgtcgaatccgagcccttcctcgaacgcagcttccaattcagccggtgcgatagccacggacttcagcgttcccaacacatccgtgaaccacaaacgaatgaagcgcacgtcgcgttcttcgactgtgcgcaaagcaaactcttgctgtttatccatagtgccccatcgttccatgcgcatgttacgaaagtcgttaacacgcgccgaatatgacgagaccgtccacgttgtggacggccgtatcgtcatgggtttgcgaacaatgctcaacgtgcgacttcaagcgcctcttccaaagtgaaggcgcgcgcatacagcgatttgccgagaatcgcggaatccacgcccagatcggcaagttccttgatggcgcgcaggtcatcgagcttggaaatgccgccggacgcagtgaccttcgcatcggtacgttccgcgacttcacgcagcaagtcgatgttcgggccactcatcatgccgtcacgagccacgtcggtgaccacgtaacgagaacagccaacggaatccaggaacgccatggtttcgaacaggtcgccgccttccttcacccatccgcgtgccgcgagggtgtggccacgcacatcaaggccgactgccacgcgatcaccgtacttcttgatgacggaagcggtccaatccggattctcaagagcggccgtgccaatgttcacacgggctgctcctgcttccaaggccgcatcgagcgatgcatcgtcacgcacaccgccggacatttcaatattgaccttgtcgcccagttctctgacgatggcacgcagctggtcacggttgttgcctgtaccaaacgcggcgtcaagatcgaccaggtgaatccattccgcaccggactcaacccatgtgcgagcggcctccaatggcgaaccgtagtcggtttccgaaccggattcaccctggcgcaggcgaacggccttgccatcacgaacatcgacggcgggaagcaatgtcaaagacatgtctgtacctctctgtgatcaaccgatcgccattacatggcaatcgcatgtatgtgcatcaaataagcgtgcatcaatcgtatatatgaagtcaacgtcgaaacaggcgatgacgatctcatatcatcagaacgtcgcaatccaattacgcagcagctgcgaacccgcttcggcggacttttcggggtggaactgcgtggcgaacagcggaccacgctcgtaggccgccacaaaacggctacgtccgtacgtgcaccaggtcacgcgctcctcggcgtcatcgaaatcaagctggtcgccggacatgtcggcaggagcggcgttcatcgcggcgaaggaatgcacgaagtagaaacgttcaccttccacacccttcatgagcacggaaccttccggtgcctcgacggtgtcccatcccatgtgcggcaccacatcggcgtcaagcagttccacgccgcccttgatcagaccaaggcccggagtgccggcgccgtgttccataccacgttcgaacatgatctgttcgcccacgcacacaccgagcaccggtcgcccggcacgcagacgatccttgatcacggtgtctccgcccaccgacttgagtccttccatgcatgcgccgaaagcgcccacgccgggcactaccagaccgttggcttccaaggcctgccgatggtcggaagtgagggtcacgtcaaggtcgagatcagccagtgcacgaaccatggaacgcacgttgccgaaaccataatcgaaaaccaccacggaagtcatgggcgttctccttcttgtgtcattcgttgttctgtggcgcgagtcgtcttgtgtcgcataacgcatgttcggcaggatgactcgcgtttaccgtcgttaactgatgcttgatgtgccgcgtccgaaccgcgtatgctcggcgataatgctcatcgccgcatcccgatcaaggtcagcggaatcgaaaatggtcatatccgcctgttccagcgcgttcatatcggtgatgcccagcatgagatcctcaacgaacggcgcggtggaggtgaatagcaccggcggagcgaaggttttgcccgctctgccttccacgtacatcgtcgcttcgagcttgtccgcacggttgacggcaagaatcgcgggcatgccggcaacgacgatcgtcatgtctttgaccgccgcttccggaccgtctccgtcgagattgcgcagcaccgcgacagcaccttgcgccgatccgatgcattgcgcggaaatgtcggacaattcacagaatgccgacagcaatcgtggcgaggtcagtctggtgatgatcaccgccactttcgcgcgattgccaagcagtccctgcagctcgtcttcgaatttcaacgaatcctcagccgcgttgagcatatcgtcgacttccgaggattcggaggattcggaggattccgcgttatcggaagcttcggaggaatcgaaagcttccgatggcggattgtccgcccgctcatgcttggacgcttcggcatccttgaattcctgctcgaagccggccatggccgcttccagttcctcttcgctgaaatgcatgccgtcggcgttgaggtcaccgaaatcgtttgatccatcgaatccttggaaatcgtcgaaatcgttatttcgatcgtcgctcatcacagagcgcccttcgtgctcggaataccgtcgacacgcggatccgactcgatggcgaaacgaagcgcacgtgccaaggccttgaactcggcttcggcgatgtggtgcggatcacggccggagatcacctgcagatgcaggcagattccggcatgcatggcgatggattccataacgtgacgcacgagggagccggtgaaatggccgccgatcatgcagtattcgaagccttccggctcgccggtgcacacgcagtacggacgcccggaaatatcgaccacggccttggcaagcgcctcgtccaacggcacggtcgcatcagcgaagcgacggatgccgcgcttgttccccagcgcctgcttcaacgcctcaccgaacacgatggcgatgtcttcgacggtatggtgcacgtcgatgtcggtgtcacccgtggccttgatggtcaggtcaatcagcgaatgcttgccgagcgccgtcatcatatggttgtagaacggcaccgacgtgtcgatgtcagttttgccggtgccgtcgagattcaggctcagttcgaccttggattcgctggtttcacgaacgatggttgcggtacgcgccatgttgcgactccttttggaaaatgttcggtcctgttgtgttggttcagtcccgtatgtgctcagtcttgttccacaatacgcaacacttcgaccaaggcttcacggaaacgcgccatttcctcgtcggtgcccatgcatacgcgcatccagccgtcagggccgacggtgcggatgagcacaccacgcttgagcagttcgtcgaagatgcggtcgcgatcgtcgaaatgaccgccgaacagaatgaagttggactgcgtctcggccacttcgagcggctggcccttgtaggtttgttccttgagccatgccgcggtctgattgcgggtgtcacgcaggtgcgccacacggctgagctgttcgtcggtatgttcgaacgcggcaagcgcggctgcctgggtgacggccgacaggtggtacggcatacgcacgatgcgcacacagtcgataatgcccttgttggcggccagatagccgactcgcgcgcctgcgaaggcgaacgccttgctcatggttcggctcacggcgagattctcatactcgccgatgagttcgagcgcggtgggcgtgcccggatcacggaattcgatgtaggcttcgtccaccacgaccaccggatgcacgccttcggcggcaccggccacttcagcggtttcggcggcgccgagcacgcgcttgagatcatccatcttcagcggtgtgccggtcggattgttcgggctggtgagcacgatcatggccggcttgacgtcttcgatggccttgatggtggcgtcgacgttcagcgagaaatcctcgttgcggtgcgcaagcttccatgtggtgaacgtgtcgcgggcgtattccggatacatcgaatacgtcggatcgcagccgagcgcaatgcgtcctggaccgccgaaagcttggaacagctgcagcatgatctcgttggatccgttggcaccccacaactggtcgacttccagcttgacgccggactcgcgttcgagatagtcgcagaatgcctgacgcaacgcgatatgctcacgatccgggtaacggttgagcgtcagagcgatttccttgactcgctgcgcgatggtttcgaccactgccggttccggcgcatacggattctcgttgacgttgaggcataccggcacgtccaattgcggcgcaccgtacggctcctcaccgatcagatcgttgcgcagcggaagatatgccggaatggcgttgctggaagtctcactcatcgaaggcctgcctgctcttcctgttccttgatggtttccttgttgtacggatcgtcgatgaaacggctcagcacgctttcaccgtgtgccggcagatcttcggaaacggcgaaggcgttcacacgagcagcgagggtcttcaatccctgctcgtcgtattcgatgacttcgaccggcttcatgaaggtgtgcacgcccagaccggaggcgaagcgtgcagtgccggaagtcggcagcacgtggttggagccggacatgtagtcgcccagcggcaccggagagtacgggccacggaagatggcaccggcgttgcgaatcttggcgatcacggcatccgggtcggcggtctggacctcaaggtgttcggcggcatacgcattggccgcgtcaatggactgctcgatgccatcggtgaggatgatgccggactggcgtccgcgtagcgacgtgttcacacgctcggagtgctcggtgcgcggcacacggtacttgaggttctcctgcacctgttcggcaatctcttcgctgtcggtgatgagcacggaaccggcgagttcgtcatgctcggcctgaccgatcagatcggcggccagccagctcgggttggcacccttgtctgcgatgatggcgatttcggtcggtcctgccacggcgtcgatgccgacgatgccggacaccatgcgcttggcggtagcgacgaagatgttacccggaccggtgatcttgtcgaccggatcgcacaggatttcgccgtcctgcggttcggatcccttggcgccgtaagcgaacatggccacggcctgagcgccgccgaccgcatacacttcgtcaacgccgagaatggcgcaggtggcgagaatggtcttgtcaggcagaccgtcggcattgttacggctcggcggggttgcgatggcgagggattccacgccggcggcctgtgccgggaccacgttcatgatgacggagctcgggtagacggccttgccacccggcacatacaggccgacacgctgcaccggaatccaacgctcggaaacgcgcgcgccttcagccagatcggtgtggaacggcgccggcacctgggaagcggacacggcgcgggagcggcgcacggattcttcgatggcggcacgcacttccggatccaactcgtcgacggcggtcttcatggcttccaccggcacgcgcaggttctccggacgaatatggtcgaatttctccgcgaagtcacgcagggccgcagcaccgcgggccttcacatcgtcaaggatgggctgcacgagatcggtggcctcgttggtgcccatctcggcgcgaggcatagcctccagcatttcagctcgggtcagcttcttgccacgcaggtcaatgattcgcatatagttttcttcgctcataacgccccatggtaacaacgtgatgtcacgagaacgcccgcgcgtctcaagttcagccgcatagtgagatattcggctgaactttcggcatcatccccacgaccggtcatcccaaaggcagagaactgggaccgaaaaggattttgatttcggcgaacagactcgtgtcgcggcgtacgcggaaacggtcgccgaacgtcagtaccttggcgttgcccttatcgtccatcaaggcgagcttcacttcgcagggtccaggatgatttgaaagaatctgccccaactgctgcacatgcgattggtcaagcgctattggcggcagcataatcgtcaccggcttctcatcctgcgcttccaacgtcggcacgttgaattccgtggcacgcatgcttaccgtctcatcgcgtttctcaacctgtccgcgaatctgcaccaccgtgtcgaccgccagttcgggagcggcggtctcatacactttgccgaagaacatgcactggatggagctttccaaatcctcgatggtcacaatcgcccaaggattgcccttcttcgacatacgacggtccacgttcgtgatcaaacccgccaccgtcacctgctggccgtcaggcatattcgccgcgcgatcgatcagatgcgcgatcgacatttcacgcaacgacaccagaatcgactgcataccgctcaacggatggtcggacacatacaagccaagcatttcacgttcgaaattcagcttggttttcttatcccactcctccacatcgggcacattcaccatggcatcgcccatgcccgcatcgtcttcgccggcatcttccaaatcggagaacaaatcaaactggccttcggcctgcttgcgtttcaaaccgaccaccgaattaatcgcagcctcatgaatcgtaaacaaggcacgacggttcggatcgatcgaatcaaacgcaccggccttaatcaacgattcaaccaatcgacgattcaacgcctccatcggcacacgcctgatgaaatcagggaaattcacatacttgccatgatcgttctcacgttccttgacaatcgcatcaaccgcagccttgccaacgttacggatggcgccaagaccgaaacgcaccacatcgccgacagcggaatactcgtacaccgactcgttcacgtcaggagacaacacctggatgcccatgcgacgagcctcgcccaaatacaacgcggtcttgtctttgttcgtactcgcaccctgcagcaacgcggccatgaattccaccggataatgcgttttcagatatgcagtccaatatgagatcaaaccgtatgcggccgaatgcgccttgttgaacgcatagcccgaaaacggcacaagaatatcccacacggcctgcgccgcctcctgggaatacccatgctccttcatgcccgcgaagaacggcaccttctccttggccagcacctcgggcttcttcttgcccattgctcgacgcaacacgtctgccttgcccaacgaataacccgccagaatacgcgcggccgactgcacctgctcctgatacacgatcagaccatacgtttcgtcaagcacttccttcaacggctcggccacttcaggatgaatcggcgtgatcttctgcaaaccattcttacgcttcgcataattcgtatgcgaatccatatccatcggaccaggacgatacaacgcgatcaatgcggaaatatcgttgaagttattcggcttcaacgttttcagcaacgaacgcataccatcagaatccaactggaacacgccaagcgtgtcacctcgcgacaacagatcgtacgtggcacgatcgtccaatggaatcttcgtatggtcgatacgcgtcttgccattcgcctcgatattgttcaacgtatcgcgaataaccgtcaagttggaaagaccaaggaagtccatcttgactaaaccaagcgtttcacacgtatgatactccaacgtggtcgtaaccgtaccatcggtacgttccagcagcggcgacgtattcgaaatcggctcgctacccatgatcgtggcgcacgcatgcacaccggtctgacggatcaagccttcgatacccatcgcctcatccgtgacgcgcttcacatccggatcggaatcataaagctcacggaattcgcgggcctccgcataacgcttcgaactcggctcgaaaatatcatgcagcggaatatccttgccacccgtctgcgccggcggcaacgccttggtgatgcgctcgcccatggagaattcgtagcccatgattcgtgcggagtccttcagcgcctgtttggttttgatggtgccgtagatcacgcattgcgcgaccttgtctcgcccgtacttgtctccgacatagtcaagcacgcgaccgcggccgtccggatcgaaatcgacgtcgatatcaggcagcgacacacgttccgggttaaggaatcgttcgaagatcaagccgtgcttgattggatcgagttcggtgatgcccatggcatacgccaccatggcgcctgccgcggagccacggccaggcccgaccatcacaccatgcgatttggcccagttgatgtagtcggccaccacaaggaagtatccgcagaactgcatctgacagatcacaccgcattcgtaatcggcctgcttgagcacttcgatcggcggatgcccgtcataacgccgttccaagccttcctcgacttttttcaggaacagcgacgtctcatcccaaccttccgggcagtcgaattggggcatgaacgcgccatcttcatgatcgtcgaacatgacattgcagcgttcggcgatttccaacgtattgtcgcatgcttcgggaatgtctttgaacagctcacgcatttcttcggcggatttcagatagtagccggtgccgtcaaatttgaatcgtcccggctcgtcaagcgtggatcccgaattgatgcacagcatggcatcctgagagccggcgtcttcggcgcgcacgtaatgggaatcgttggtggcgagcagcggcgcgttcagttttttcgcaatgtccagcagaccgtcggtcacctgtttttcgattttcagaccgtggtccatgaattcgatatagaaattgtcacgtccgaaaatatcctgcaattcgcctgccgcacgtaatgcctcgtcgaattggccgagcagcagtcgcgtttggatgatgcccgacgggcatccggaagatgcgataatgcctttcgaatatttggcaaggatttccttatccattcgggggtatcgcatgacacgtccctcgagattcgcgtcagtggacgccttcatcagattgacaaggccctcatcggtttccgcccacatcgtaaggtgggtgatcaggccaccgccggatacgtcgttggggttgcgcctgcgatgttgcggatcgatatcgggattccagttggtatcccagctgacgcgggtttgatcttggcgtgcggtttccggcgtcacatacgcttcaatgccgataatcggtttgacgccttccttgaccgcagtgctccacatttcgtatgcgccatgcatgttgccgtgatcggtgatgccgacggccggcatgttgagttctttggcgcgcctgaccagatccggaatctttgacgccccgtcaagcagtgaataatgcgtgtgattatgcagttgcacgaaatttccggaagtagccatacgttccaatctaccggtgattggtgacgtgcgatcacacttcaggcttgtcttgtgtgtcgtgcctgccacgcatcacgtcgagcgcatgctgcaaatcagctggataatgcgatttcaccgtggtccacacatgggttcgcggatggcggaattcaagttgcttggcgtgcagccactgccgttccaatcccaatgcctcacccaactgcggattggcaccgtacatggcgtctcccgcaagcggatgcccgatggacgagaaatgcacgcggatctgatgggttcgaccggtttccagattcacggaaaccaacgtcgcctcaccgaaacgttccatcacatcccaatgggtgatggcttctttgccggcgggcgtaacgcaaaaacgaaaatcggagactttggcacgtccgatcggcgcttcgatcgtggccttgttttccttgagattgccttgcacgagcgcatgataggttttgacgacttcatgttcggcgaactgcctgcgcatttccacgtaggcgaggtcagatttgcacacgagcatcaatccggatgtgcccacgtcgaggcgggatacgataccctgacgtcccgcggcgccgtaagaggtgatgtgcactcccctgtcaagcagactgccgagcaccgtcggaccggtccaaccgacggaagcgtgagcagccacacccactggcttgtcgaccactatgacgtcatcgtcttcgtagaccactgccatatctcgtgcgatcggttcaggctcggtccgttcctcgacaatatcgaattcgacggtttcgcctgattgcagagtcgatgatttggaaatgtcacgaccaagcacgcgcgcctgtccactttcgatgagttccgcggccttggctcgggagataccaagcatcttggccacggccacatcgaatcgtttgccgacaagcgcgtcgggtgcgggaacaagacggctcatgcgttctggtctccggtcgtctgtttcgtctgttctgcggcctgttcgtcaagatccttctggctgaagggctctccgacaaacagcagtacgacggcggcgacgcccgccaccatcaggaaaatatccgcaacattgccgaccgaccatccgtaattgaggaaatcgacgaccttgccattaaggaaaccttcggcatacatcacacgatcgatgagattgcccaatgctcctgcgaaagcaagagcgaacaccaccgtccatttcatggaaatggtacggattgccagtacggccaacgccacgcacgccacgatggcaagcaacgaaatcaaccaggtcatgttggatcccatgcccaaggacgcacccggattatgcaccagcgtgaatgagaggatgcccggaatcacacgtaccgtctgcccgtcggcaagcgccgactgcgcccatgccttgctgatctggtcgagtaccagtgccacaacggcgatacacgcaaagacggccacgcgggtgcgcagccgtctttgatcatttgtcatgatgtcagacacagcctaatctcagtcgtcctgggagtcctgatcatagttgttcgtgtcggacacctgggacacgagctggccgaggaattcggtaagacgtgcacggtattcggtttcgaactgcttgaggccctgaatgttgccttcgatgaccttggtctgcgcttcgagattgtcgcggacctgctgggcgtagtcgtcggctgcggtacgggtcttcgaatcgtagtcgaaggcgcgcttctgcacttcggactcgtattcgtcggcttcgttgtgcttcgtggagaagtaggtatcaccatcctgggtcttctgagcaaggtaggcgtcgccttcctgagtcttctgatccaagtaggcatcaccctcctgcgtcttctgagcaagataggcgtcgccttcctgagtcttctgatccaagtaggcatcaccctcctgcgtcttctgagcaagataggcgttaccttcctgagtcttctgatccaagtaagcattaccttcctgagtgcgctgcgccagatagtcatcgccttcctgagcacgcttggtcagataggcatcgccttcctgagtcttctggttcaagtagccatcagccttggcacgagtgtcagccgaatactgatcggcttcggaacgggtgccttcggagtagttgtcggcttcggtgcgagtgcggttggagtaatcgttggcattgccgatgagctcatcgtacctacgctgggactcgtcggtgatttccttagccttggctttgcccttgtcgacgtactggtcgtgcagctgcatagccagggtcagcatggcggtggcacgctccggctccgtgttggcgctggctgcggctcctgcaatcttctgcaggcttccggtttcggtactcggttcgaccttggcgacctgctcgcgcagctgggcttcacgctgctgcgattcctgcagctgctgtgcaagctgctgaatctgcgcggcctgctgctgggcacgctcatcctgctgctgggactgtgccgcatgctgctgcgtgagctgctgagcttgggcgacctgctcctgagcctcttcaagccttgcattgagctgctggatctcagccgcctgctgctgggccaccacaacctgctgctgtgcggaagccagctgacgggacaggtcttcggtctgtgcacggaatgcgtcgcgctcatgctgcatggaggtcagctgttcgcccagatccgcctggcctgcagcttcagccgcctgtgcggtgagctggtcgacctgtgcggacaggcgatccacctgacccttgagctgttcgttctgagccgacagagcacggttgctttcctcagcctcggtgagcttggctgctgcgacctgtgcggcctgagctgcctgatcaccagcgccagctgcctgctcggaggcggacttcaatgtcgcgttctcctgctgcagggactgaacctgggcgctgagctcggaaatcttggagttgagccccgcaacatccgggccgagggactgagtagcctggccgctggcaaccgcctgcttgccaagggcctccaccgtctcggttacctgatcgagaaaatcgtcgacttcatcgacgtcatacccctccttgaacctcacggtctggaaggtatgctctctgatatctttcggcgtcaacagagccataaatcttacacctcgctttgggcttgatgccttgctgttgttgctttcattgttcgactctagcacgggaccaccgattttttgcgaaaaatcggcatttgacatacattaaatgaggaaatcaatagcaatgagaatgaaataaagaacgatgaatgccacatcgaagtagatgggacccaatggaatagggcggatatattggcgtagccagcgcagtgggggctccgtcaactggtaaaccgcgtcgatcaacgacgacaccaacccccgtggacgccatgccgatgccaacacagcaacccaatcgagaatcatgcgaatgaacagcaccagaatgtaggcattcaccaaaaagtggacgatgctaccgatcaaagacaaaatcatggggcaccaccttagcaacagaacataacaaagcccccatcacgggtgacggaggcttcatgcagtctgctttcgcaacggctttcgtctatatcagtcggcgaacaaatcgtgcgacgagttattcgcctgcggttcctcaaccttgatgttcacctgagctgggctcagcaggaacacgcgcggagtgacacgttcgatggagccacgcacgccaaaaaccacacccgcggaaaagtccacaatgcgatatgccacggcctcggccacaccggtcaggttcagcaccaccggaacgccgtcgcgaatggcacgtccgaccagctgagcgtcctcataggatttcgggtgaatcgtggtgatacggctcacccttccgccttggaacgggttggctttggtctgctcgcgcggtgcggacgtcgcggcaggagtcgaagccatcggggtcacggaatggtcggaatcgaacgaggtttcgctgctctcagcctcttcgttgaaatcctcgtcaccttcggcaacgtcggtcatgcccaaataggacatcgcgcttttcataaaacctgccatgaacgatcctttcgcgtcttcgcgttgcttttagcgcaggaaatccggaatatccaaatcgccggcgtcgttcgaagacaccacttcatgctcggtggtctggtcgaatgacggaacgacgggttccggagtggacggaatataagtggacagcggctgcaccttcggggcttccggagtctgaataagctgaggctggggctgctgcggaaccgccgctgccctcggggctgcggacaacgccgacagcggcaccgtgctttccgcaggctctgcctgcttctgggcttcagcctgagccgccttcttggagttggcatcaaagcctgcggcgataacggtgacacgcacttcgtcgccgtaagcgtcgtcgagggaaagaccccagatgatctgtgcttccggatggatggccttgcccaccagctgggtggcggcggccgcttcctgcaacttcagatcggacgggccggcgatattgatcagcgcgccgtgggcaccctcgatgctttcttccagcagcggcgagctgatggcgatttcagctgcctgggtggcgcgatcctcgcctcgtgcggaaccgatgccgaacagtgcggtgcccgcgccacgcagaatagcgttgacatcgttgaagtcgacgtgaatgtacgagttcgaagaaatcaggtcggtgatgccctgcacgccggccagcaaggcggtgtcggcggtcttgaacgcatcgacgatgccgatggtgcgatcggaaagctcaagcagtcgatcgttcggaatcacgatcagcgcatcgacttccttgcgcagattctcaatgccaagtgctgcggaagccgcacgctggggaccttcaaagctgaacgggcgggtaaccaccgcaatggtcagggcaccctgctgatgcgcggcgcgagccacgatcgggcttgcaccggtaccggtgccaccaccctcaccgcaggtcacgaacaccatatcggcgcccttgagcgattcctcgatatcggactgatgatcctgagcggccttggcacccttctccgggtcggcacctgcgccaagcccgcggctggtggcatcgttcaaggagatcttgacatcggcgtcggaacgcatcaggtccttcgcgtcagtattgatcgcaatgaattcaacactttgaagaccctcggcaatcatgcgattgacggcattaccgccagctccaccaacaccgacaaccttgatattcgttttgtcgttgaaattgtcagtctgggcaatctcgctcaccatagtctcctgtcactcgcgtttacgcacaactttatcgcagacacgctgcagtacgcgcacttttcgccgtgtgtaacggcgttttttcacttttttattgctaacgtgttcatttcgcctgcgatttaccctctttcggtgcccccacgacgatttaaccacatcagcatgtcatattcaatagctggcgtccataggatcatccccaaacaacgcctgacgttcatcatgcgttgtttcccgtgattccaaccatccgtaaggcagatgcactttctttgcgaagcgcacgcgcccccttggcttgtcgaccactcgctcgggaaaacggatgttgggatccagcttgcctatttcggctctgacatcctcaagattttcacattccatgaacgcgcgacgggtggagcctccaacggggaatcccttgagataccacgcgatatgcttacgcagatcatgcacggccatctgctcatcgccatcatagaattcggtcaacagttccgcatggcgttcaaccacacggcacacatctcctaacgtggggtcaacacgcttgtcgctgccagcgaacgcattcttgatatcggcgaacagccatggcctgccttggcagccgcggccaatcgcaacgccggcgcaaccggtttcggcaaccatggcaagcgcatcgttcgcaccccaaatatcgccgttgccgaacactggaatgtcaagcgcttcgaccagctcgccaatccggctccagtcggaatgcccgccgtaatattcggcggtggtacgcgcgtgcaaggtcaccgccttgcagccttcctcctgcgcgatatggcccgcttccaagaacgtttcatgctcatggtcgatgccgacgcggattttagccgtcaccggcacgttggcagcatcgcagaccttgaccacacgctggatgatctcgcgaaacagatccgtcttccacggcaaagccgatccgccgccgcgtcgggtcactttcggcacggggcatccgaagttcagatcgacatggtcggccatgttttcgtcgatgacgattttcgcggcctgttccacgatcgccgggttcacaccgtacagttgcagcgaacggattttctcgctcggcgcgaaatggcacaaccgcaacgctttgggattgcgtgcgaccaacgcgcgcgcggtgatcatttcggccacgtatagaccgtccggtccgtagctttcgcaaatcacgcggaacggccagttggtaacgcccgccataggcgaaagcaccaccggggtttcaacgtgtaccggccctaaatcaacaggcttcataaccggaggaaccgacggcctcaccgcgtcggtacgcgggtcgagcacgtcggattcctcgtaagcagtcacaatgctatctggcataagaacgctatggtaaccagtatccagctttaatacaagccaccggcttcggcgatcttgacggactcaggccaagcctcgccgcccatctcaaccggcacctgcgggtaacgtacatgcttctcgccaatacgtgcggccacataatcagccaccttgtcgagtgcgacgcgctcctgctgcatggtatcacgttcgcgaatggtgacggcctgatcgtcaagcgtgtcgaagtcgacggtgatgcacagcggggtgccgatttcgtcttcacggcgatagcgacgaccgatcgcaccggcctcgtcatagtcgatcatccagtcatgctgacgcaaatcggcggccagatcgtgtgccacggtctgcaattccggcttcttgctcaacggcagtacagcggccttgaccggagccaggcgcggatcaaggcgaagcacggtgcgcttatcgacgccgcccttggtattcggggcctcgtcaacgtcgtaggcgtcaacaaggaaggccatgagggaacgggtcaggccggcggccggttcgatgacgtacggcacgtatttttcgccggtggcctggttgaagtagctcagatcctcgccggaatgcttggcatgcgcggaaagatcgaagtcggtacggttggcgacgccttcaagctcgccccaatcggaaccctggaagccgaacttgtattcgatgtcgacggtacgcttcgaatagtgggccagcttctccttcggatgctcataatggcgcaggttctccggcttcacaccaaggtcgatgtaccactgggtacgcgcgtcgatccagtactggtgccattcctcatcggtgcccggagccacgaagaattccatttccatctgctcgaactcgcgggtgcggaagatgaagttgcccggagtgatctcgttacggaaggacttgcccatgttggcgatgccgaacggcggcttggaacgcgaagaagtcatcacgttcttgaagtccacgaaaatgccctgtgcggtttccggacgcaggtagtgcagcgagttctcgtcttcgaccggtccgaggtgggtgcgcagcatcatgttgaagtcgcgcggttcggtccagttgccacgggtgccgcaatccgggcacacaatgtctttcaggccgttttccggcagcttgtcgccatgcttttcggcataggattcctcaagtttgtcggcgcggtgacgcttgtggcagttgaggcattcgatcagcggatcgttgaacacggacacgtgaccggaagccacccacacggccggcggaagaataatggacgtgtcaacgcccaccacgtcgccacgggtgacgaccatggaacgccaccattcgcgcttgatattgtctttcagcgcaacgccgagcggaccgtaatcccacgcggaacgggttccaccatagatttcaccggcggggaaaacaaagccacgacgcttggcgagggatacgacttcatcgagtttggatacagccacaatgcaccttctggtttgaacggtttggggtctttacaagcgcaaagcctacctttacgcggtgacagaacgccacccgcgttactgtttcgtggcgttctcgtcttcaaccgtgtcgttgtcgagcaatagcgaccagatcttgcaatcgatcaccacggcatttttcgtttcgtcaccgtttctgtcaagtgtgtaggtcacattttccggcacggcgatacggttgatgttctgcacggatgccacgaaattacgcatggcatcatagcttcccgtggcggtgatacttaccgacacctgcaccagctgaccggcttgaatggtaccttgcatttcagctggaatgtcggcgtcgaccgcatcatcgaaattcaccgatttgatggcgacgccggttcccgcagctgacgcatccaacgaattgatgaattcctgctggttatagccgtctggaatctgccgctgcaactggcgcaaacggtctttctgcaggccgatcgtttcgctggcgatgcgtaatgtttcgatttcgtcgcgtgtttccttattgttctcatcgatttgcgcagtttgcgcgtcggatgatttgatatggctgatttgcggggaaacgccgaccagccatgtcagcatgatgacgaagacaatacctgcggccaatgcgatccatgcgattttatgcttgttcatgattgctcccgatcattcattggatgtttcgtcagttgcggtcgcgctgtcggtagtatcagtcgactcccctgccgcggctttgttcaggctgtcgcgtagctgctgctgcaatgctcggttggcttcgtcagcaccggccgcgttgtcgcttcgtgacgtggtattggtatccatcttcaacgacaccgttcccgtgtatgtataggtggtgccgttttcatcgctgttttcggtaatggaactcacatagcctgttttataggtaggaattgcagcaaaattaccgataaaatcttttgcagatatgaaatctggagaaagaacggtaaaatcaacggaaatcacaccattcccagaccatactgaagatgtagcgctatgcgaagaagcgtcagacccgccaatctggaagctgctcaacgacaggttcgtgtactggcctccggctggcagcgcgccattgagcgaatccaccaccttcatccaatccatttcgtcgtagagcgcggcgatacgtgacctttgcgaatcggacagcgagttcaacgtgtcttccacgtctttgaattccgccttttccttctgcaacgacagggttttcgcctgtgcctcctccacgcgatggtcggcccagctcacgcgcaccgccatgcccgcgctgatggcaatggccgcaaccaccaccacgataagcacgtatgacagcaagtatttgatggcacgatcacggttgagcgtcacgatggaacgtggcagcaggttggcgcgcacattccattcggcgggcagatcagcctttttggaggttttcgaactgctcgcacgcagcgctttgccgatgtcggaaatattcatcgacaaaatcgaggttttctcgccatcactggtttcaggattcggattatccttgattttgccgcgtcgaccgcggtgggagctgccgatctgcttcatgcttccgttgttttttctgctcatcgtccgttcacctcggcttctttccgattaccagtccaagcactgcgcccaaatcgatcgcgtgcgccatgatgttctgccgttccacttctttggaaagccggaaacggatgaaggggtcgccgatccgcaccactttgttgatggaactggccaataccggcggcagtccgatcagccgtgcgccggttccggtaagcaccacgccgctgatggtgccgcccgcatggtccacgtcgtacaggttgagcgtattgcggatgccgacgatcagctgcgccgtggtttcgcggatgacttcctcggctttttcgagtcgttcgtcgccggtcacgttttgcaggccgatctggtttttgatgcgttcggcgtcttcgaatgagatactgagcgcgttggcgatggcgtcagtcacgtcatccgcgccggatggcacgacgcgcatgtaggcgggctgcccgttttcgagcacgatcacgtcggtgccgttgccgctgatgttgaccaccgcttcggtctgctgctggttggtgtcggcgaacagtctggcaagcgcgaacgggcccgcatcgatcgatgtgatcacaaatcccgcgtcttcggctgtgcgcgcggttttttccaatccgttacgcaatgtcgccacgagtatgccgtgcaactgtttgccttgttcgctgtcgatgacgttcaatggcacgaagtcgagctcggattcctcaataggcagcggaatcatgcctttggcttggaaaggcaaggtggatttcagatcgttcagcgacatgtagggaaagtccgtctcgcgaaacaccatgcgtcggctggagtagacgagagccgtgtcctcgcgggggaatttgaatcgcttcaccagtgtgttcagcagtccggccaccacatcatggtcgaccacttcgccatccactacggctccgttcggcaacgggatcgcctggaaatgcttgatggtgggcagatccgaatacgggtctgctatgaccgccgcacggatggcgtcgttcgcgatcgacagcgccgttattgatctcatgctctctccttatatataacgtgttgcaggttggctggggattggttcaggcgagtcccgtcacttgcaagtacagtgtggcgatcggagccccgacgaatatgccaagccatatgccgagcagcatggacggtccgaacggtatgcctccatgcatatcgacttttttgccgataatcagcacaagacttaagaatcctccaataaagaaggctgcgaacgccccgatgatgaattgcgaccatccgagccagcccgtaatcaagccaagtatgaacgcaagtttgatatcgccatcgcccatgccacctttccatatgatggaaagcaataggtagaacgcgccgagcactatcgcacatatcacagcgcgaccgagcctgttccactcattcgtaccgagtgatgccaaagccagcagtgccagtgttgcaatcagcgttggcaatagcacaacattgaggatcagatgatggtcgagatcaatgtatgcgatcacgatcgaaaccgctgcgaatacgtagagttccggcaatatccatggcgaatacgcgccgaatagcgcccccaaggtgacggcgaggaacgacagtccgcccaacgcttccacaatcgggtagcgtacggcgatcggctctttgcaatgccggcatttcgcgccgagcaccagccaagaaatgatgggaatattgtcataccatgcgatcggggcttcgcagttcgggcagaaactgcgtttcggatttaccaagctgatgtggttgggcacgcgccaaatcaccacgttcagaaacgatccgaaaatgcagccgattaccagcgatgccacgagtagcagcaccacagttggcgtatcgttcacaatgctcatgttcacatccatctcgcgcagcgctcaccatgcgatagtggacgggttcagttctttggatgtcacgtagcctttggtggaggatggctccaatgtggtagaactaccaccgccataaatcacgccgccgcctgagccgcctgttccgaggttaaccgaggcattccacacctgcgatttgatttctcggttcaaaaagtctcgtgacgatccgcatttggccataatcacgtcggcatgcccgtcgatacgtccggagtatgagggattgccgtcgattttgtctcccggatacacttccgtcaggcattgaccgttgagttggaacgtacctttactgtgctcgtcagacgctttttcgttgtatcgggtgaatgttggcgcagccgagcattccataagttggaatttgcccgaaccgccgaacccatagcaacgcttcgacccgttcaccatcgtccaaatctgcgtgttcacaccactgccgtcactcgacgtgtcttcaacatattcggcctgatcggttttacgcttggtggaatcggacaccccgcagtagtcgatctgatgcagatcggaagatgattgcgccggattgccattgatggtgttgtggtagcagtatgggttgaaatcaccgccacccactcggcaggttgacgtgtatgcgtcgaatccgtcttgcgatgacgaaatgcagaatccggacgtttcattgacgatctgcttcgtggcatagccggcttctcccgcctgtccgaacgatgcggtggcgtcttcgaaatcaccgttcacgtcgaaccaggatttcacgtcggtgagcgaataatcccacttcgacaccatcaggaaatgcggagtcaaatcgacagcatcatcgacgttggacgcccagtgaccgccgctcagatattgaatagtggcgcccacattcgccttgttggaaacttccagcacttggaagcgcgtcttcttctgcatttgcacaccgccgacggcatagccttgcgattccggtagagacgcatcatacttgttcgcctcatcgcgcacgctatctagctcgttgtagtagcccgcattgatgaaaccgttatagaacgcccacttctggtatttgttgagcaggcttgacggatcgttcttttcgtcttgctgcgctttcttgtcaggatcggtgtaatagtcgctttggtagttggggccgtacgactcgccgcatttctgcaatgtggcggctcctgcagtgcctccgccaacatgcgtaatgtcagctccggtaacgcacaatgtcagattggatgcagggcgaatggaatcatccttccaatacacccatgtgttcaggtctttgtaggcgccgttggctttgcactgttccgtgtaatacaggtcgtcgctgctggagtctttcttatgcgcttgcataagaatcaccaacgccgatccttccaccggcttgccgttcgggtcaagcatggcgtcaagcgtttcgaccttgtctacaggcttggtggtggcaagcatgcaagtttggtttgccggattcatagtgatggtattgctcatagcgtcggccgcattcttggagccaggcttgttgacatagttcaccatgccggtcggatcaccgttctcatcgacatcatatgaggcgatttccttccaggtcggctggttggtacggcgctcgttgtttggcgctgccgcgtagaagcccataccgagacgtccacccttggtggaaatcacgtagctgtcatcaccgctcgttgtctcgaattggtagatggcgctcatggctcggcgcgcgctggtttccgtacccgcgcttcgcccattcggatacctgttgatatacccgtaggaacgcacccacgcatatttcgcgttcttcagctcgctttcggatgtgagtcgtttggccggcgatgagcttggatcgtcgtcataatatccgatttgcactcggtacgagatatcgtctggagtgaacgagctcacgcccgttgccgacacgtcgttgctgacttccgcattgttgagcagcaccgacccgtccgatgctgtagtgaaggtctcatccaagctggcattgccagtgtttgatgcggtcgacggtagcagtttcttatagtccttgcttgcttccgcttcgcgcaggaaactcaatgccacttcgagtccagattcggcggcatacccgacttgcgcgttctccttattattcctgtacggcaatgcttgcgaaagcagtatggtcattaccagtgccgacgtggtgagcaccaccattacgaacagtaccgcgagcatcatggccgcgccccgctcccccatgcgttggcataatctggcacgatacctgcggttgaatccggcccacaatccgttcttcatgttcaaccttcccgctttcgcttacgcttgcccgttgatggcgtcgaacatggagaacatcggcatgtacaatgccaccaccatgaagccgaccacgctaccgagcaccagaatcatcaacggttccagcaacgaagtgagctgtttggccatggattgcgcttcttcgtcatacgctttgcccgcgctggcgagcatctggtcgatggcgccggaatcctcaccgatcgccaccatctgcaccatcatgttcgggaacactttttcggtacccatactgtccgccagcctatagccgcgttccacgagtcgagacactcgtttggacgcttcgtcgattacataattgccggatgtggatccgacaatgtcaagcgcctgcagaatgggcacgcccgaagcgagcatggatgtgaaattgttgcagaatcgcgccaatgccacattggtggtcagtttgccgaacacgggtgccttcaacgtgaacggatcccaccaggtacgaatgatgtctttgttgcgattgcgcttccaaaacatgacgaacgccaccgcgcacacaatgatcacgggaatgccaaccggtgcggccttgcccatatcaaccatgatctgcgtgacccatggcagttccgcgcccatcgacgcatacatgctgtcgaacatgggcacgatggtcagcagcatcacgcccaccagcagcacagcaatgccgagcaccaccaccgggtaagccagtgcgcctttgatctgaccttgcaaacgcacgtccgcttcaaagctgtcggccacggtaatcagggatttgtcaaggaagccgccggtttcgccggcccgcaccatgttggtcataatgggcgggaacagatggtcgggattattgtccattgcttcggaaaacgatgatcccgcctcaacctgctgcatgcagtcacgtaccgcattgcgcagtttcacatttccgatttgttcagtaacgatattcagtgcgcgaatcagggagacgcctgccgccaccatggtggcaagctgacgtgacataaccgcgaagtcttttttgcttggatatttttcgaacgctttgatttcaatattggtattgagaccggtgcctgcgttcacgtcaacaagttccgttggaatcagaccgagtttattcacgcgatcgatggcctgatctcgcgtctgcgcttcgataacgcccttctgcttggtgcggccgtcagcggaaacacccttgtaacgccacttcttggtgccggtttgaaatgccacttgcgcctgttccctggccattactcccccatggaatgattgacgaacaatggaacgaatatggatacggaacaaggtatcggagcgatacctcatacgctccgatacctttagtcccacgcgaattattcgctatgccttttattatttagtaccagtcttagagacgacaccgttggccgagtcatacaggaaaatcgctgtaccagagttctcgttctcgccctcgatagtgtaggagttatctgctttaccggtaatcttcagggtaacaccctcagttacggtaatcgtattgcctccaagcgtgcagcccgtattctggctcttactgcacgtggccgttgcaccattaatctcagacggaagcttgccattgttggcagtggacgcagtttcaaccacgaggctggcgttcttgacgtcggactcggtctgggagttccaggccgacttgcgctggttcaggtagatcggaacggagatggcggcgaggatgccgatgatgatgaccaccacgagcagctcgacaagggtaaagcccttttcgcccttggcacggcggttgagtgcgttgcgcacgctcttcataattgaatccttctttccttcgggaaaggtcgccgctcgcatcccacgatggagcttcgcggcgttcttctatcgatcgtccccttgtgggggctgctggctcacataaccaacagtcttaactttatccgcattgacatcgtttgcagaaccattattccggcgtcaatcgttttacgagcgtttcattttcgattcattttcccctcatccttcatccgtacaaaagcgtttcagcttaccccacaacccccttcacaaccatcaagcaaatcacactttttcaagcggccacaaaaggtacaacacaaaaccaaaatcgtgcaacaaaaaatacaacaccacaaatagcttgtttttcagtacaatcgctcagcaaatctttgcagtcacgtttttttgaaaaaactggaataaccacccttttcgggcgtgtcgcagggtgctgacggggcgacaaaaacggctggccccataaggaaccagccgtctgccgcaagatctagcggaacactcagacacacggagtgaaatcgattgcagttccacccgatttcacattgcgtgcggtgaacgacgtggacgtattcgacgtgaccggcttgccgctcacatacgaccccgtcaccggcgaataacgcaccacccgattggtgccatccaccgtgaataatcgcgaggcgaacatcgaatcatcagacgtgcctcccgactcgttgttcattaccgaccccaacaccgcgcgcgtgctccatgacgtgacggacgcatcatacggcttcgtttttaccttcacgctaccgtaatcgcttaccgtaccgttcttccacgtggcgtcctggtacgtgatcaccacgcactgcttcgcaccagaatcccccggagtgaccatggtgatcgtatggttcgtggcgtcatactcaacaccctccgcgtagcgcacataccggtcgaggctttgcaccgacgtggctatttccgtggaagacctgcttcgtatcgcatccgcgctggtggaatgcaggtattgcacgatcgccgtggtgaacatggtggagacgatggcgaagatgaacagcgacaccatcatctccaccaaggtgacgccgctttcaccgcgcgccatacgttgcgcgacggcgcgaatacgcagttttccgcttgttgttccgctcattgcaacccctcactagatgatgagcttgttgtcgacgccaatatccagcagttccgacgtggtgtacaggcaggttttgccctgatgcatgttgtcgtcccatgtgacgcccaccaccacgcggatcatgggcatatacgtgtgcgcaccgaacgtgaacgcgcccgataccgttttgcccggatccagaatgtcggccgtggcgcttgttgaggtattggccgtatagctcgttgcggaactacgggaaatgcccagctgagatgcggtcttgcacgagatctcgccgctggcacggaaacagcgctccaccaccgtgttcaccgtatattcggtatgcttggcgtccttgcccgcagtggcacgaaccggctgaatatacttgctcttgtctggatcaggcgaactggtatagctcagatccgccaattgcgacgcgatggcgccaacgtcggaaagattcttctgcgcggcggtgacggacgtttcccccatgcctttgatgagttcatcgagatattggttggcgtctacattggcgatctgcgcacgcattctttccatgccgtcgtcgcccagcgacacggcggtggaccgctgctgctgcgcatatgacgtgcgaatggccgtaatggcgaactgtgcggcggcaagtcccgtaatgctcaacaccacgatcgccaccagcacttccaccaacgtgaagccggactcgccacgttttggcaatcgattgacgcgactcgccgcaacccctgaatcgggggcgtctcccgctgtgcgcaagctgtactccatgagcagctccttcacaagatgccaccccatcattggaagcggcaggaattcggcacgcaaccaaacgcggtgccataaacatgagttactgtatcacgatattctgccaacgttttcacagcaacatatttctcaaaaaactttgccccgattagcttttacctgtttttgcggctacaatgctgatttagcagtacacaatactgcaatcgttgtagctcacatgacttcgaacaactgaacatcagccaccccacaaatgctgccgtttgcttggggtttcatgttatgccgtatgacaggcgcataagcgcgcatgcggtgcaggaggtcattatgagcgacgccggttcgggaggccgtttccccttcctcaggcgaaacaaaaacagcgacacgccgaacgctttcccgcaaagtatggatccgatcgcgccgacgaccggcgagatccatcaggtgttcgcgccgagcacaccacgccatgcggcaacgacaagcgacgtcaccggagattttcccgccatgccaacgtccaccgaaggcatggacgaacagaccgaacgccaatatgccatggcgttggcgcaaggcatgagcctgccgttcgtggacctcaacgaataccagatcgacaaagaagtcatcagcatggttcccgacgatctgtgccgacgcaaccagcttctgccgctttccatcgtcaacgggcgcatcgccgtagccatggcgaatccgaaaaatttcgccgcggtagacgatgtttccgcaacaaccggcatgcccgtcatcgccatggtcgccatgccatcgcaggtacgcgactgcatcaaccggttcctgcgcgccaatgcggagttgaccgaactatcgcacgagatcgccgcgaccgcgaaaaaagaagtcgaccttgaacaagacgacagcgaagacgcctcccccgtggcacgcttcgtaagtctgctcatcaaccaggccatcgacgaccactgctccgatatccatatcgaaccgcaggaagacggtctgctcgtacgctaccgcatcgacggcgtgttgcatatcttccaaaaagcgccacgcgccatgacccaaggtgtgatcagccgcattaaggtcatggccgaaatggatatcggcgagcgccgcaagccgcaggatggccgtattaccgtacgtcacaacggtcagaaggttgatcttcgcgtggcggcattgcctacggtgtggggcgagaaaatcgtcatgcgtattttgagcacgccttcgggcaatctcaaagtggaggatctgaatttcagcgaacgcaatttcgatgtgttttccaaagcgtacaaccgcccgtacggcatggtgttggtgactggtccgaccggttcgggtaagtcgaccacgttgtatgcgacgttgggcgatgtggcccgcccggaaatcaacatcatcacggttgaagaccctgtggaattccgcatggagggcatcaatcaggtgcaggtgaacaataaggcgggtatgacctttgccgccgcgttgcgttcgattcttcgtgccgaccctgatgtggtgctgatcggtgagattcgagacgaggagacggcgaccattgcgatcgaggcttcgctgacgggccatttggtgctgtccacgttgcacaccaatgatgctccgagtgcggtgacgcgtttgacggaaatgggcgtggaaccgtttttggtgagctcgtcgctggctgcggtgatggcgcagcgtctggcgaggcgcctgtgcaagaaatgccggaaggccgatacggccactcccgtggagttgaagatgatgggtgtgccatatacgcccggctctccgttgccgaccgtgtaccgtgcgatgggttgccgtgaatgttccaacaccggatatcacgggcgtgtggccattcagcaggtaatgggcgtggacacgcagatggaggatttgatcgcgcgtggcgccacgtcgctggaaatcgagcaagcggccaagtcgaaaggcatgacatcgcttcgtgaggatggctggcagaaggttctgcaaggcattacttccgtggatgaagtgcttcgcgtgaccgtgtagttgtgtaatcgtgtgactgcgttttcaacatacataaaggacaatgatgaccaatattgaacagcaacccgagctgaaaaccgaaatgaacaccgcgacggatcccgatgcgcagccgacttgggatgcgaacaccgatttgtctggtttgaaaggtgtgaccattcccagtaccgctccttcattcaacgaggatccgcgtaggggacgccattggtcgcccgacaatgcgattcaggctgacgatgacagtttgcgcaatattttcgcgtcgcttgacgccatacccgcgttgcggcatggttccggtaccgttcccgaccccatgcctaaggccgcggtcgagcaacagccggcggccgagcctcaacagagcgcacagcggcagcctatgcaacagtcagctgccccgcaagccgttgcatcacaatctgtagcggaaccgcagcccgctccgacacggcctgcggaaacaccgctcattgcagaacaacaggaactctcctacgacaccgcttttccggaaaccccggaaaacgaagccgtggatcagcagaatctgcaattcgacgatgacgtgacggaagtcacccctgcattcgagtatcatggaccgatccagcaaatcgacggcgatccgccatcattcattccaggcggcacgccgttcgcgcaacagccggacgactatgcggcgtacgaggagaacacgcagaccatgcagccttccgccatcaaccatattgcgcagcctgcgcccgctgccagaccgcaacccaatatgaacaacaggctaatcgtggatttcatagtgcccgaaaccaatgattccgacgaggacgctgttcccggacaacgcagaatcaaagcgcaccaggtcaaagaaacattgcatgccgaacatcccgatgcggatccggaattcgtggctgccatatgccagctggtggaattgaacgcgtccgatcttcatctggtggtcaacgatccgccaatgctgcgcgtggatggcaagctgcgccccgccaaagggctgagcgtgtggaacaaggaccgcacgtatgaagccatcaaagtgatgaccaacgagctggagatggaacggttcaaagacgatttggaacttgatatttcattctccatcggcgatctgctgcgattccgcgtcaacgtataccgcgaccgtttgggcgtgtgcgcggcattacgaaccattcccacggaaatcaaaaccgcgcaggagcttggtctcgacccgcatatcgccgatctggcgttactgccgcgtggactcgtgctcgtatgcggtccgaccggctccggcaaatccaccacgctcgccgcgattgtcgacagagcgaatgccgaacgcgccgaccatatcatcaccattgaagacccgatcgaattcgtgcatcaacacaagcgttgcgtgatgagccagcgtgaagtgggcaccgacaccaaaagtttcgcggaagcgcttaaacgcgcgcttcgtgaagatcccgacattatcgaagtgggcgagcttcgagacctcgaaaccatttccaccgcgttgaccgccgtggaaaccggccacttggtgttcgccaccctgcacacgcaggacgccggttcgaccgtggaccgtctgatcgacgtgtacccggaaaatcagcagcagcagattcgcgtgcaggtggcctccactctgcgcgcggtggtcgtgcaaaccctgatttcacgtgccagcgggcatggccgcgctcctgccaccgaagtgatgatcaacactccggccgtggccgcgttgattcgcggaggcaaggcgcatcagattcgtaccgtgctgcaatccggcgaaaaggaaggcatgcatacgcttgaccaagatctggcgagactcgtcaacaagggcgtcatcaccttcgaagacgctcttgccaaggtgcaggtcctcgaggaattcgaaaaactctgcggcgcccgctcctccttctgacctcgccgtacccatacaccatctttacacctatcatgagcaacacagcagaaacaccaaccatcatccagcccgacgtttcggcgaaccgcgcgacgaaccttcgaaaaagactcttcacctggttcgccgaacaacggctgcactgcattgtcttcatcgcctacgtgacagtgaccgtcaccgtgtcgtgttttcacgaaccatggtttgatgaggcgcaagcctggctgatcgcacgtgattgctcatggaaggaactgcttaccgtacgcacccattacgaaggacacccacctctttggtggatgctgcttgccattcccgccaaacttggcatgccttacgaaataggattgaaatccctcaatcttatgtgcgccgcgctgatgatctggcttttggaattcaaaacgaaactacccgaattactaaaggtaatactgccattttcctattttctttgctaccagtatggcgtaacttccagaccatatgcgcttatgatcgccgcaatgctgctcatagccatcaattggaacaaccgcaacaccaagccatggccagtcatactcagcatgatgctgctatgcgccacgagctcttacggattggcaatcgccggcatgcttgccttgaattggacgattcaatttctctgcggcgaacgctcgcttataaaaaacaagcagcgtttcgcgggacttgttctgctactggtattcgccatcatactgctcctcaacgtactccccgcacccggcacataccacggtgactttgacatacatggcactgcaacaacatcacccgcatgggtttccgtattcaacacctggctggtaatgccttccgagacgttgttcacttcaaccctgtcggatggcaatatgcagttcatcgctctcacgccaagcaagctgtttatgccgtgcgtaatgtcatgcctgatgtggtgttttcttattcagatttgcctacgccggaaaaccgcatcattgctgctcaccacatacttgggtataagcgttgcgttcaccgcgcatctttccatgcatcatgcgggaatcatcttgggattcttcatcgccattctcgccatcgattgcgatatcgaaaaaatcaattccaacgattggcctcagtggatccgtaatctcaacaaccgtgttatgactcttcttggaccgaagaaaacggaacggtatctccgtttcttcaaaatcctcggtcttatcttcatgcttgtcagcgtgtattggacggcaagcgccagtatttgcgatattcggtacgactattcgtcttcccgggcggtagcgtcttttatcaaaaccaaccatttggagcaataccgttggatggcaggctggacacgcgtcagcaagaacgacaccgcttccaatccagaaatcaacaaaatcatcgacaaaggcggatattgcggcggcaccgactgcatcgactacacttcttggtacggcagcacccttatcgattcagccccttacttcgaccatacgcttcttgccaatgcatacaagggacgaagctattcgtcgtgggaatggtgcgttgacccctatgcgggaaagaaagacatcgaaacatggaaatcgtggggcgaacccgaattctacgacactctgtatcagccatttttcttctccgaccttggttacgacagaaaccattacacgaaaatcaaaatcgccgaaaccaagacaccttggaaaagcacatggtcggaaggcgcctgcgaaatttacgtgcgcaacgacatttacgagaacgtattgcattcgcccgatcctggaatcgactggcccgacggcgcaacgcgcagataacaagtggaccggcatccaactggaacgtgtcgattgttcgtttatgcaaaacgtgccactgtcagcacctttgtataggttagatatgttatgtacatgcaggggggcttccggcgaaagcggaagctgagataggcaaatgcctgaccctttgaacctgttggttaggaccaacgtagggagcagacaatgggcgatgactcatatgcagctgcattgcgtgaacagattgcgcaggcagtaaacgacgtacgcgaaaccacacctttggcacagtcgttcaccaatttcgtaacgatgaatcttgtggccaacgcgcagctggccgccggcggcaccgcagccatgagcttcctgcctgacgacgtgatcgacaccgcggaaatcgccggatcgaactacatcaatgtgggcacactcctgccgttcttcaaggacgcgctaccggaaatcgcctacaaactgcacaagaacggcaagacgtgggtacttgatccggtcgccgcgggcatcggcaaaacccgtaccgccattctcgaatcgttccgcacatacccgccgaccattgtgcgcggcaatgcgagcgaaatcatcgcgctcgatgcgatgtggggtttggcacagcatgattccaccgttcccggcactcgcccggcaggcgtggaagccgtcgacgaagtcgattccgccgttgacgcggccaaacgagtggctcgtcatcttgcgaaatactcccctgttggagccggcgcggtggccgtttccggagcagtcgatctggtgactgacggcgagcgcgtgttccgtttgcccggcggcagcgcgatgatgacgaagatcaccggcgccggctgttcgctcggcggcgttaccgcaacgtatctggccgtggccgaaccgcttgtcgccgcgatttcggcatcattgctgtataacagggcttccgaaatcgccgaagcgaaatcgtccggtcccggatctttccaagtggcgctgcttgacgcgctttggaacgtcaccgccgaggaagtcgccgcttccgaaatcatcatcgactaggctttgccgaaccctgcatggtattcggcatatcatgcggggttcggcaattgcgtatatggaaaatatggacgattgccggttcacattgtaggttttctgaatcacttaccgagaagggttgattatatgaacaattattcatatgcatcgatgcgcgatacattcgatatgagcgcctactttgtggtcggcccgcaggattgcaagagccgtactattaccggtgtgattgaggatgcgttgcgcgggggtgcaacgttcatccagctgcgagccaagaacaccgacgcgaaagacatcaccagcatggcacgcgatatcgcgcaggttatcgagaacaacggcaaatccgattccgtggcgtttgtgatcgacgatcgcgtggatgtagtttggcaggcacgtcacaagggcatcaaagttgacggcgtgcatattgggcaaaccgacttggaaccgcaggaagcccgcgcgttgcttggggaagatgccattgtgggcttgtctgccgaaacggaaagcctggtgaagctgatcaacgagctgcctgccggctgcatcgactacatcggggccggcccgttgcacgtgtccaccaccaagccggaagcttccgttggtggcaacgatggttccgggcatacgctcgacgaggcgcagatcaatgcgatctgcgatgcgagtgattttccggttgtggtcggcggtggagtgaccgccgacgatatggagatgctcgcacattcgaaggcggccggctggtttgtggtgtcggccattgccggcgcaagcgatccggaagaggcgacccgcaatatggtttcgcgatggaaggcagtgcgcggtgatgcaaagcatgggcacgtactgcgcaaatagcaatcacggatcacgaatatttcagaacttcgcatcataagcaagcaaaagcaagtaaggagtcattcatgaccagcactttggcaccggtattgagcatcgcgggatcggattcctccggtggtgccggcattcaggcggatttgaaaaccatgcttgccaatggcgtgttcggtatgaccgccatcgcggcgctgaccgcgcagaacaccacaggcgtgaccatggtcacgaacactcctccggaaatgctcgccgcgcaaatcgacgcagtatttgaagatattccgccggtcgcggtgaagatcggcatggtgtcgagcgtggagctcatcaacgtgatcgccgaccgtctgattgcgcatgatgccacgaatattgtgcttgatccggtgatggtggcaacatccggtgcgaagcttatcgaaggcgacgcgattgcggcactgacttccaagctgttcccgctggccaccgtcatcacgccgaatatgccggagacccaggcgctgtgcgagctggccgtcgaacagggtgccgacgcgatcgactacgagaatggcgaaagcatctccagtgagaacgacatggtgacggcaggccatatgctcgccggccatttcggctgcgcggtgctcgtcaaaggcggtcatggcacgcaggatgccagcgatgtgctcgttgaaccgagcggcaaagtcacttggttccgcgcgcgtcgtatcaataatccgaacacgcatggcaccggatgcacgctgtcttcggcgatcgcatcgcatctggcgcttggcgagacattgccggaagccgtcgatagtgcaaaactgtatctgacgggcgccttggaggcgcagcttgacctcggtcacggatccggaccgatggatcacgcttggaaatggcgctgacagccaaatccgcaccagccaatccaagtcgtatcaggccgataggaacgcaacgaaaggaacgaacatgacccttgatcgcaatgcggaaaagcaggaagtgccgatcaacccggaaaccggcaaaccgtatatcaacacgcttgccgcagtcgccatctcccccgccggcgcaagccctgaaaagtccacgtacgtggcgcaggcggtcgacgtgatccgtcaatccggattgccgagtgaaaccaacgccatgttcaccaacatcgaaggcgacatcgacgacgtgctcaaggtgattcgcgacgccaccatgaagctggctggccagggctatcgcaccgacgtggtgatccgtctcgacattcgcccgggtttcgaaggtcagatccacgccaagcaggcacttgtggacgaaatcctgtcggaataaatcaggcaataaactgttagatcgtcagaaaaatcgaaaagcgcgctatttataaggaatggcgcgcttttcttattgatttgggtatagtgtagcgaatatgactacgatgaaggaaattgccgaagcgacaggggtgtccatttccactgtttccctggtgcttaacggcagggatgaaggacgtgtgaaagcccctttggccgcgctcgtacgcgagaaggcagacgaactcggctacacggtcaatcctctggcgcgcagcctgcgcacttgccgcacgcgaattctcggcttcatcagcgaggaagttgccaccacgccgtacgcaggcggcatcattctgggcgcgcaagacgcggcaagcacctacgggtacatgatcatcacggtcagcaccgatggcagggcgagcgaagagaacgaaatcgccacgctgaaacggtatggcgtggacggtttcttctattcgaagatgtcgaatcgcattgcgagcgtgccagcctcgctcggcgattatccggtggtgatggtggatgccaccgatgccgacaaccagattcccagcatcgagccggacgaattccaaatcgcctatgatgccacgaaacggctgattcaggccgattgcaagcgtatcgcctacatcggatgctcggaaaacatgattgcgcaggatggccgttttgccgggtatcaggcggcattgcaggattccggtttcgcctatgatccttcgctggtatgcaatgtgctcaataatggtcctgcgttgcgtgccgtcgacaaactgtttgacgaacgcaatcccgacggtttcttttgcttcaatgatgcgcgtgcatggtatgtgtacgaatgtgcggcacgccgcggactgaccgtcggcaaggacgttcccatcgtcggcgtcgacaaccaccgcgtgttcgccgaaacgctggaaccgcagctgaccacggtggaactgccccactatgagatgggttattgggccgcatgcaagcttatttcgatgatcgaacgcaagcccgtcgacagttcgtcttggccgaataccaccgctcccatgccgccgttggattcgccgattcctgcgaagatccattgcgcgctgatagaaaagggatcggttcgcagctaagtttcgcgatctaagaccacatgaaaggcctgttgacgtgtccgttacgacacgccgagaggccttcttttttcatcccccatttcggcttaattccaacacttccgaaaagcgttggaattacttacgtcaatcgattgacgtcaatcgttttacgcactattatttaaccatgttcatccacttggcacggcagctgggtgaatgacggcataacacaacatcggcacacaaccgaggtgccgcgcggcagcggcacaaacaaagagaaacagagaaacaacaacatggcaagtacaactcgatctgcatggaagaatccttcctacctgcagagctccttcggcatcttcatgttcttctgctcgtggggcatctggtggtccttcttctcccgctggcttaccgacccggcccacggtctgggcatgacctccgccgagcagggccagatctactccatcaactccctggcaaccctggtcatcatgttcgcctacggcgccatccaggaccaactgggcatcaagcgtaagctcgtgatcttcgtctccgccatcgcagcgctcgtcggcccgttcgtgcagttcgtgtatgccccgatgctgacagccggcggcaccacccgtttcatcggcgtgctcatcggctccatcgtgctgtccgcaggtttcatggccggctgctccctgttcgaggcactcaccgaacgctactcccgcaagttcggcttcgaatacggccagtcccgagcttggggctcattcggctacgccatcgtggcgctgtgtgcaggcttcctgttcaatatcaacccgctgctgaacttctgggtcggctccatctgcggcctcggcatgctgtgcatctacgctttctgggttccggccgagcagaaggaagagctcaagaaggaagctgatccgaacgcggctccgaccaacccgtccttcaaggaaatgatttccgttctgaagatgccgaccctgtgggtgctcatcgttttcatgctgttcaccaacaccttctacaccgtgttcgatcagcagatgttcccgaactactacgcttccctcttctccaccactgaaatcggcaacgccacctacggcaccctgaactccttccaggtgttcctcgagtccgccatgatgggtgtcgttccgatcatcatgaagaagatcggcgtgcgcaactccctgctgctcggtgcaaccgtgatgttcctgcgcatcggcctgtgcggcgtgttccacgatccggtcagcgtctccatcgtcaagctgttccactccatcgaggttccgctgttctgcctgccggcattccgctacttcaccctgcacttcgacaccaagctgtcggcaaccctgtacatggtgggcttccagatcgcttcccagatcggccaggtgatcttctccaccccgatgggcgccctgcatgacgccatgggcgatcgcccgaccttcttcaccatctccggcatcgtgctggcagccctgatctacggcttcttcgtgatcaagaaggacgaccaggaagtcggcggtgatccgttctacaccgacaagcagctcaaggcccaggccgctgcagaagcgaatgcctgaacgcaatcgcaagtccagccaagaacataactgaatcgtgctgctcgaagcgtttcccctttttccgcttcgggcagcattcttacaacttttactcaaaactcaataagcagcaattcaacaatcacaagaaaggctattcaacgatgactggcttcaccccggacgcacccgtccttcacgaaatcaagaaccacagcgaagccctggcacaggcggaagcaggcgttgcagccatggccgccgaacgcaacaaccgctggtacccgaagttccacatcgcatccaacggcggctggatcaacgatccgaacggcctgtgcttctacaagggccgttggcacgtgttctaccagctgcacccgtacggcacccagtggggtccgatgcactggggccacgtctcatccaccgacatgctcaactggaagcgtgagccgatcatgttcgccccgactctcgaagaggaaaaagacggcgtgttctccggttccgcagtgatcggcgatgacggcgagctcaagttctactacaccggccaccgctgggccaacggcatcgacaacaccggcggcgactggcaggtgcagatgatcgccgaaccagacaacgacgagctgaccagcgccaccaagcgcggcatgatcatcgattgcccgctcgataaggtcgaccaccactaccgtgacccgaaggtatggaagaccggagacaagtggtacatgaccttcggtgtctcctccgtagaaaagcgcggccagatgtggctgttctcctccgatgacatggttcgttggacctacgagcgtgtgctgttcgaacacccggatccgaacgtcttcatgcttgaatgcccggacttcttcccgatcaaggacgccgagggcaatgagaagtgggtcatcggcttctccgccatgggcgcaaaggcctccggtttcatgaaccgcaacgtttccaacgccggctacatgatcggcacgtggaccccgggcgaggcgttccagccggaaaccgagtttcgcctgtgggattgcggccacaactattacgctccgcagtccttcaacgatggcgagcgccagatcgtatacggctggatgagcccgttcgttgagccgattccgatgcaggatgacggctggtgcggcaacctgacccttccgcgtgagatcaccctgggcgccgacggcgatctgcacaccgctccggttgccgaaatggagggcttgcgcgaaaacaccaccgatttcggtgcgatctcgctggacgtcaatggcgagcagaccattgccgacgatgccgaagccgttgaaatcgaaatgaccatcgatctcaacgcttccaccgcggaacgcgccggtctgaagattcacgcgactgaggatggctcttacacgtatgtggcgttcgacgatcagatcggccgcgtggtgatcgaccgtcagaccgcagcccagggcgatcgtggctaccgtaccgcgccgctttccgccgaagaactggcttccggcgagctcaagctgcgcgtgtttgtggatcgcggctgcgtggaagtgtacgtaaacgacggccgtcaggccatgagctccttcagctacgcttccgaaggcccacgagccatcaaacttgttgccgaatccggcacgcttgaggtcaagtccttgaagctccacaccatgaagtccatcggactggagtgaagctaatccaaggcagtagcaaggggtaaagagtaaggcgggtttcgtgtcgaatgagatacgaaacccgcctttcgttttggtttggaacgtggtttagggagtgctttatactggcaccccggtaatgaacttttctgaccggaacgcgggcaggctcctcaccttactgatttctcgccaccggtcacgtgcgcgcccactatggcgcagaaagcaaggtgaacgatggcggtttcgcacgttcaacgcagggattcggcaacaggatccataccctcaaacacgagttcgcacatgggttcgggcatggctgcgaacacgaattcaaaagccggcattgtcgcaaaacttctcgaagctttgtccgcctttgctcacgtttgcaaacgccgtattcccacggttattgcagtagtgctgttgctggcggtatgggaggcgtgggtccgcatcggcaatgtgcccagcaccatgatcgccgcgccaagcgaaatcgcacaggccaccgtcgaaacatggtcgacgttatggcctgccacgcaagtcactttgcttgaaggtaccgtcggattcctgttcgccgtactgttcggcattctcatcggcatactgctgtactgctcatgcattgcgaacgccgcattgctcccgttgctttcagctgcgcagaccatgccgttgatttccatcgctcccctatttttgatctggtttggctttgagatttccggaaaaatcgtgatcgtaacggtattcggcttattcccgattgcagtgcagacgattcgtgggcttgaagcggtcccccagttttattcggatgttgcgctgacttgtggcgccacgaaagcgtggacactgtggcatgtgaagctgcgtgtggccgctcgtcagatttatggcggcatccgcgtttccgccgcatacattttcgccaccgccgccaccgcagaatatttgggcgcgcgcaaaggtcttggcatttggctacaggccgcctacaactcgttccgcacaccgctgatcttctcggcgacgctggtcatcatcgccatcaccggcgttctggtgtgcctggtgaacctcagcgaacgcgtcctgctcggcccagctgatgccgacgccgatcccgatgcagaccagtaagtcaaacacgccaaacatcatcggccttctgcaaacgcagcattcgcagcattcgccactccgcattgcatgtcggtcacgctgcctacgtataataaaatccgctgttaagccaatgtgtggcaaaccggcaatattccacgcctttcactaggcaccgtaaggaatgtcgggggcattggacgagcgggggcctgaggcccttcgtatcgttttctgcccgaactccgctcgcagcatatccctagaaaacgatagagaatacagattcaagggaaatcgctttatgagcatcttcagcaggcatgacgccaccgcacgtactcacatcgcaagcacaataatcgcactcttcagcgcaatcgccatgttgttcagcgttaccgcatgcggacaaagcaacgattccgcaacaagcacagcatctggcagcagcgatctgaccaaagtgaccttcatgctgtcctgggcgcccgacaccaatcatatcggcgtatatgtggcgaaaaacaagggttatttcaaagaggcaggtcttgacgttgatatcgtggccgtggcacaggccggtgccgaacaggccgtgaacaacggcgtggccgacttcgcattgtcgaatctcaccaacgtaagcacgtacgctgttaagggcgcaaccatcaagcaggtgctgcaggtacagcagaagccaagcgccatctggtgttcgctcgcttccaacactgaaatcaaatccccgaaggatttcgacggcaagactttcgccacgttcggatccaacgaatccgatgcggtgatccgtcgcatgattcagtcggacggaggtaagggcgaattcgacaaggtgaccgtcggcacgtccacgttccaaacgctgtccagcaacaaggctgatttcggtggtttctatgccacttgggagggtgtgcaggccgacatgtacggtccgaagctcaactgctttaccgaaccggattacggcgttcccggcaatgccgacaccattggcgtgatcaccagcgacaagacgatttccaacaatcccgaactggtgaagaagttcgtacaagccaccaagaagggctacgagtacgcatattcgaatcctgacgatgcagcgaagatccttgtgaaggaagctcccgacgcgaatctcaagcttgatttcgtcaagaaaagcatgaaaaccattgtggacggtcagtattggggcgatcccgccaagatcaaggatggttcgttcacgttcggtacgaacgacgttgaaggcgcccagcagtatttcgacttcctcgctcaggaagacgcctacaccgattcgcatgacaaggtggtgcacgacgctccgcaagccaaggatctcgccaccgacgaattcctgaaataatcgggtttgaacgagtaggtttgtaacccgttcaggtacgaataatcgaaaatattggaatacggcatcctgcatttttatttcatgcccaacactgcttgctcagttcgggttgaacatggtttgtgggatgccgcaccattatgcgttgcatttggcttcattgcacgagtttgattaaatacaaatatgacacgactgattcttgatgtggacaccggtatcgacgatgcactggcgttggcataccttgcgacgttcgacactgttgacgtgcttggcgtgatcggcacgtacggcaatgtttccgtcgacactgcggttcgcaatacttcgtatgtgctggaacggttggggcttcggcacattccggtgatacgtggatcgtcgcatccttcatgggctcggtgtttcattccggatgcaggttgtgcgcagtttcacggcacggacggattgggaggattcggcccggcttgcgatagttcgtcttcggatactgctttttcagatattttttcggataattccggttctgatactgttttttctcgtgattatcgtagtctgatttccgttggcggatatgcgttggatgatgttcatgcgaatcctgcggttgattcgtttgaattgtcgcttactacggattcggcttcttttattcatgctgatgattcttccgccgactcggtttccgaaggcgtgcagttcattattgatcaggttcgcgcttatggtttcgacgtcactgtggttacgaccggtccgctgaccgatattgatgctgcgatcgcggccgcaccggatattgccggcaaactcaaactggtgatgatgggcggcacgttgacgcaggaaggcaactgttgggatctgactgcggaaacgaacatcattcaggatccggaagccgcagatcgcgtgttccattccggtgccgacatcaccatggtcggcttggacgtaacgcatcaatgcctgatgggttccgatgcgacccgtgcttggcgtgaagcagcgaatgctgacacacttaccagctcgaccgcatcccaagtcgctgattcacttgatggttcagctggtagttcaaatgcagcttcagctcgaacctcgagtgtggctgcaagcccatctgcttccgatgtgcgcgtattcctcgccgacatggctgatttttccattgccgcaaacctcaaggccgacgcgcgactgttttcacagggcatgccattgcatgatccgctggccgccgccgttgccgtggacccgtcgctggtgacctgtatcgacctaccaatgaaagtcgaactcgaaaccggcgatttccacggcacccgaggccgaaccatcggcgatcccgccggactgatcgactccaacgcaccccgcatccacgtagccttccaagtcgactcctcccgtttcgtccccaccttcaccacccgaatcagcacgttgtaacaaacaaaacggggagaacattatgttctccccgcagttaacctaatcaactcagcaaaaactactttttgacgccgccgaaacgacggtcgcggtgaatgtagtggtcgatcgaacgccatagcacgtctcgaccgcaatcggggaacagttccggcacgaaatcaagttcggcatatgccgcttcccacggcaggaagttcgacgtgcgctgttcgccggaagtacgaatcaccaaatcgcaatcaggaatatcaggattgtacaggtgctcggaaatcattttttccgttacgcgatcgccggagatcttgccgtcacgcacttcctttgcgattgccgcgcaagcatccgcgatttcggcacgtccgccgtaattcaggcagaacaccacgtcgatggtcgtgttgtttttggtacgttcctgtgctttttccaattcgtcgataacggatttccatagtttcggacgtcggccggaccagcgcacgcgcacgccccacgcgttcatctgctccacacgacggtggatgatatcacgcgagaagcccatcaggaagcgcacttcctgcggggaacgcttccagttctccgtggagaacgtatacagcgacaggtaacgcacaccggcttcgatggcacctgcgatggtgtcgaacaccaccggttcggcagcctgatgcccgtcggtgcgaatcagcccacgctgctgcgcccaacgaccattaccgtccatgatcacgccgatatggcgcggaaccttgttcttcggaaaatcaggaataatcgacgggtcagaaaatggtgccgccggaatgtcaagggacttgtaatccacattctcaaaagccatacccgctaatctagcaagcgcatggaacgaatcggacgttccaaatagtattcaccccatttttccaccatttgtcgggtttccggaagcaacgccgtaccgtccagctctccccaatcgccgtctacaagcgcctgcagctggcagatcgcattccacgaaacatcaaacgattcacgaatatgatcggtcaaacacattagtccgcccgcggaaatcgaaaagaaccatggacgatcagcagaaatcggctccccgcacaccacgcaggcacgcaaacgcggcgtccagccagcgatcgcaagagcacgcatcacgtaggaatcgccaatcgcagcagcctcatgcgcatgcttggaaagggcattcaacgctcccaacaccagccgatactgtgccacggaacgctcctgctccgtcaccaccagcttgtcagcggtttcgcaaatcacattcgctgcggtatacgccttgaaatcggtgcagatgcctctcgcatacgccgacaccgactcggcttgggaaatcacatcaagcgaacgcccttccgcaataagcaacgagacgcgcatgaaaggctccaaacgacctccgaaacgcgatttggttcgacgcacacctttggcgacggcgcggattttgccatggtcacgtgtcagcaaagtgacgatacgatcagcttcgccaagtttgacggtacgcaagaccacgccctcgtcctgatacaacggcattcacacacctccttcgcctcgactcgttttcttaactgaactatctatactttccgcacgttctcgcgccagccgcactctcccgcgatatcagtaaataaacaatccccagaacgcgaacaccaacagcacatacagcatggtgaccgccgtgatccaaaacatcacacggccgaacctcgtcgacgcgagcaccggctggcggccactcacaatcgcgcctatagcccccttacgcggtggccattgtgcaaggccacgattcgtcgcctcctcgataagacgcacgaacacgcgagaccacgcccacaccacaacaacacacaccatttgaataaccggccaactccaatacatcatgcccggatcctcggcgggagcgccaccccacgctagcttgaccacgcccataaccacttcgcccaatcctgcaccaaacagcacaaaagtggccatggtggcaacggcaagcgtaatcaacgcatttttgaacacaggtctcagccccaacacatatcggcgtcgatgcgcatgcgcccaaatcttacgtacgagcacaatcagccacagcacgccgatcaccagcagcaacagcaccatgctggcatgcagcaccacgagataaatggtcagcccgctgttcgcctgcaattccaacggcaccgcaatcgactgatacaagttggtaccggccacacgctcgctggtctgctgcagtccccgcgtgatgccgacagcccaactgattacatcatccacgtaggcgtcggcgaacggagtgccgctgttggattcgtcgccgagtcggagcacatggttggcgatggggtatgtgcgcacggtcacgtcccaattgcccgccttatgcgccatgtcgatgattttctccgtaccttccacctgcgcggtcatcacgtctttggtgccgtatgccacaagcgtgggaatggaataggcttggggattcaacgtgtcgaggtcgagattggtcaggccgaacaattccgcatcgatgttgaacgcgcggcgcacaatggactggtatccatcatgcgctccgaccagcgcgaaatcctgtgcggcaaggaatcccaacgaatgtcgtggcgaatacaccattgggctcagcaacacctggaatgccacgtcggggtcttgatcaagcagatatgaggaaatccaggtgctttcggaagtcgcgtaaatgccgacattcgaagcgtcaacgttgtcgagatcacgcaacatggtgatgacctgatcgtaaatggccgcggagcccgggtaatcacgggtcgcatcgttggtggaccataccggcttgtcgagcacggccgtcacgaagcctgcggatgagagatcggtggccatgtctccaaatgagttgtcacaggtgccatatccggcaccatgcatgaacaccacgccgggccgattgtttcccgcgtctttcggctctcgaatcaacactttgacctgttgtatttcaccggttgacggctgtttcgcctcaatggtgacatatcgttgcgtcacttcgtaatcgcctcgtttggcaagggttttgccggaaggattatcgaaggtcactgccgtgtcggatgataacgtttcgatggtttgaccggttggctcgtactcccatgacgatgccgtcaaattggataccgacaccagaatgcccagcaggatgatgaagataggcagactgaccatcagccgtctgcccctcgtccactgactggattggctctccgcgctggacatgactgactgacgttcctgatctgacacgccgttcattgtaccgactccagctgaaatggcaatcgacaaccagcaaaaccagcgggcggccgatcacaatctgcaatcgaccgcccgcggtcagcgaaatcaacaattaccttgcgccaccggcaccaccaccggtcctgtggcgttgacgggcacctgtccgtccgcttccatctgcgcggcgatctcctgcgctttgaccagcagcgtttccacaatctggtcttccggcacggtttgaatgactttgcccttgatgaaaatctgtcccttgccgttgccggatgccacacccaaatcggcttcacgggcctcgcccggaccgttgacgatgcagcccataacagccacgcgaatcggcgcggtcacatcctttaaaccttcggtcaccgcattggccaactgaatcacatcaacctgggaacgaccgcagctcgggcaggagataatgtcgaacttgcgcggacgcaatcccatgtattccagcagcttgcacccgactttcacttcttcgacgggcggtgccgacagcgaaacgcgaatcgtgtctccaatgccttcagccagcagcgcaccgaatgccaaacagcttttgatggtgccctgccatgccggtccagcttcggtgacaccaagatgcaacggccaatcacccttggaagcgagcagacgatacgtttccaccatggtgatcacatcatgatgcttgacggaaatcttgaaatcatggaagccgacgtcttcgaacatgcgcgcttccttcatggcggacgcaaccagtgcctccggcgtcggaccgccatatttcgcatacagttccttatcgagcgagcccgcgttcacgccgatgcgcaacgaaatgcccgcgtccgtggcggctttgcaaatggaagggccaacctcgtcgaatttgcggatgttgccggggttcacacgcaccgcagcgcagcccgcgtcaatggcctggaacacgtatttgctttggaaatgaatatcggcgatgaccggaatcggtgatttctttacgatttccggcaatgcgtcggcatcatcctggctgggtacggccacgcgcacgatatcgcagccggctgcggtcagttccgcgatctgctgcaatgtcgcgggaacattggctgtcagcgtattggtcatggattgcaccgagattggcgctcccccaccgactggaacggggccgaccataatacggtgcgatttgcggcgcggatgcagcgggctttcgctaatggctgcctcaccggttttacggaacggcttttcgatttctggcatacgtcaaatccttgcaataacaaggctcccgacttagggagccttgcgtcacttacgtttcgtctgtttgttttgtttcgttttccgttacttgtttatcaggtcgtcggctcgacgacgggcttccagctcgagttggctcatttcctccacggaagcgaatagcggattgccgcgcagttccgcatccatttcgtccaacacttccttgacggtatcgacgatgccgagatatggcaagcgatgttcgaggaaggcgtgaacggcctgttcgttggcagcattcagcacggccgtatgcttttcggaagcttccaagcaatgtcgagccaagctcactgcggggaatgcctcatcgtcaagcggttcgaacgtccacatggcggctttcgtccaatcacaggccgctgcgatgttgccaagtcgttcgggagccgataggccaagcgcgatcggcagacgcatatcaggcggtgaagcctgtgcgatggtggcgccatcgcggaattccaccatggaatgcacgatggattgcgggtgcacggtcacgtcgatacggctcggaggcacgtcgaacagacggctcgcttcgatgacttcaagccccttgttcatcaacgtggacgagttgatggtcaccaccggacccatattccaagtagggtggttcaacgcctgttcaggcgtgatgtcggtcatctgctcgcgtttccaaccgcggaacggacctccggaagcggtgaccacgagtttcgacacttcaccgtgcgtgcccgaacgcaacgattgccagatggcggaatgttcggaatcaaccggattgatctgctgcgcacgaacctgtgcgtcgaacagcagatgaccgccggccacaacggattccttgttggcgagcgccagctgcgatcctgcctgcagtgccgcaatcgaaggttcaaggccgatggatccggtaatgccgttcaacaccacgtcggcaccggatccggccatggcgattaccgcttccggcccggccatgatttccacatggcttgcgccggcttggtttagcgcatcttggagcgcatggaccgcgtttgtgttgaagatggcgactttcgaaacgtgaaattggaccgcctgttgggccagaagttccacgtgggagccgcctgccgcaagtccgaccacgttgaaacggtcgagatggcgggagatgacgtcaagtccttgggtgccgatggatccggtggatcccagaatgactacggttgaggtttgcatgggttatgcgtgtgctccgtatttgttttggattattcgtgtgaacgcgaaaacaggctgacggtcacgtcagcctgttcagtgcgattgcctattcaaaagaggggaacgacaggtcgggaatatcgacatccagattgctgttggatgcttcgaacatcggattggttgccggcttggtttcgttcttcttctcttcctctgccggtttcgccggttcaacgggagttgccgttgtcgagtgatctgcggaggttgctggttccagcgtgaaggagggtgggacggtcggcaaggttccgagattaatcgagtcggtattgacctgcggaaggttcggcgtcgacaggcttggcatgcgcggagtgaacgtgtcttcgaccggatcgggagcgtcgatgttctgggccatctgcgccaaggcagccaacgaagaatcgggagcgatgttgatgccgtgagattcttccggctgatgtgcgaccgaagtgtctggaatcacaggagccgcaggcgcggccggagcgtcatagctcggcgcgccatcatcagaaagcggattgaacgcttcggtttccgttcctgcggaagatggctcctcggcaaccgcattggacgctttgaacaggtgtgccaacgactgttccggagccgctggagcaaccggagcggcctgaggttccggcgttacaggagctgccggagttaccggagccgacggggtgctgatggttggctggaacacaggcggaaccacgggagcatacgtcggcgcagcggtttgagtggccggaatgctcaccggggacgttgcaggcgtggtgaaaatctcacgttccgccttattcaaagcgtcgaaggagtcagtgctgttttgaacctgagcgggctgcgcaataggttctgcggaaacggctggaacggcgaataacggcgagaccacctgcgtctcttgggatgccagactggttgcggacggattggctgcggtcatcgcgctttcggagggctcgcccacgaagtcggccacacgagcataggattcgagtctggtcagcagctgcacgcattcgttcaggtaataatccacctgacgctcgtcatagccacgcttgcccttgcgctgggtgaagatcacattcgccacggtctgggagttcagatcgacaagtttcttggcatcgtcttccgacacttcctcaacgccgagctcgccagcggccttcgtcaggcactgatcgacgatgcgatccacttgcttgcggtcatagctcggttccttgccttctcctggcttgaaacgttcgccgtgctcacgtttggaatgggcgtcaagctggcggaacagactttcggtctgcgctttccacgccacacgaccgtgctgcgaaatctcccatgtggtctgcttgtccaccacggcgcgctccaaacgagcaagggccgcgtccacttgggcgatcacatagccgcctttgaccaaatcgaaagaaacattctgaatatcatgctgggtgagttgcgctccctcaccttcgtacagcatgtgcgcacgctcaagaaaagcgtccacctgttcggaatcatacccccacttgcgctttgaagtacgagcgatccccgatgcgttcctctcggattcaggttcctgcgccattggctatcgacctcctactgcactactcaacgtccccactctacgtgattgattcgacgcttttggctttcttgtggaaaattcagcgaatcgacactcaaatcacaccatttttcacgcatttactatggaaggaacccctattgggcagcgcgacacacgttgaagctgtcgcaggcaacgaatactgtacagtggagctttgcgggcgattagctcagttggttagagcgccacctttacacggtggatgtcgggggttcgagtccctcatcgcccaccttttgtttccgcagaaaataagccgttccgactcttctgatattcccaactatctcgtgcgcgtgtcagcaaaatcatgacttttgtcaatatagacaatttcatggaaacatcttcttcgactgcttccgcaagcaaaaaaaggctcggaatcgtgtgattccaagcctttatatgagcgcccgaccttggccatgcgtgccaaggcaggtaaaacgaatacgatcagcggcctttgccgaatgcgcgcagacggatgccgttccagtcaccgctgacggtcagcggcgtggctgcattcatgccggcggtcttcgcggcggactgcacggtgcttgaacttgccgcgcccgggcgccccggcttcggggtgagcacccacaatggaccatcgtctccaaggaccgcatacgcatcgacgatggtgtcagacagttcgtcttcgtcatcgccgtcgcgccaccagataatcacgccatcaacggcggaatcatagtcctcgtcgaccagctcttcaccggtcagctcctcgatcttggcgcggatcgagtcgtccacatcatcgtcccacagccattcctgtaccaggtcgccggcgtggaaaccgaattcttcagcgttatcagatgccgtttgattcacgttcgtcaatataccaacactgctcgaacatatacgttacgaaccgtggaattgctcactttgcgagattgttttttcttatatctcggaatgcgtcactctcccgcggagcattgcggcagggatgcacccttgccgtctcggacggcaaccagcgcatcgtacgcctcctgcaaagtggacaccttcaccacgttcaaaccttccggaatatgatccacaacgctggaacaattggattccggggcaaggaaccaagttgctccgtcgcgtttcgctccgagcatcttcaaacggatgcctccgatttcaccgacttcacctttgtcgttcatagtgcccgttcccgcgatgatcttacccccagaaagtttttcaccggtcaccttgtcgatcagaccaagcgtgtacatcatgcccgccgacggcccgccgatgtcgtccacatgcatggacaccttcatgccggacacgtcataaccatgctcttccaggaactttttcgccgctgcggtggcggaatcctgcgatgacgtcatctccttgtcgctggactgcttgtattcctctgcggtctgcccaacaggaaccaccgcttcctgaggcatcaccgtggatttcgaatcggcccacgccaccaatgcctgcgcgttcgacaccgggtaccctggcacgcctgaagcattgaccgtgaccaacagcagttggcctgaatccttatacgttttcgcaccggaaacggcgatgacctgcttgccggaaacctccccgagcacattctgtgtcgggccgggcacctgcaccacatacgcgctgggcataatcaacaccaatacgcacagtaccgccaccaacggtcctgcaagataacgccatgaacgcgcggacagccaaccttccgcgcctatcagccatcgtttgacacgtcccggagcgccgctacgtgtgtttttgccgtgaattcgtcgtgtttccttcatcttgggcatacctcccataacatagtatggaaccaaccaaacttgaaaaaacgcttaggaaaaggcagggccggcatggacgagaacgcgatccgccaatggtttatcgattgtttcggaccaattcaaggcgagatggcatggaaccagttttccaacatgccggaagagttgcgcgaccagttgatgagtcaggatgtgagcaagcttcccaagccggccgaggtcaggtcgatgatgcaggcgttcactgcgggcgggctcaacactttcggagacatccagcacatcaccgaggaaggtccaatcaacgtcaaactggcgaaatcattggcattgcagcaggccaatggcgaaggatcggaaaccagtgtgagcgcggagtacggcgagatggcccggcgagccatcagcgaggcgaatctgtggcttgacaccgcttgcgaattcaaccccgcgcaaggcgaaacgcaggtgcttacccgcgcaggctgggtggaaggatgcatcgattcctgggcgcagtttgcatccccgattgccgagtcgatgagcgacgctctggcttcgattttgtcacagcgtttcggcgattccgaattccatacggaaatttccggcattttcgccggtccggtgcagattccgattcccgatgatatgaaagatccggcaaaactcatgcgtttcgtcggcaatacgtcgttcgccatgcagctgggacgtgccgccggcgatttgtcgcatgaggtgcgcggcagtttcgaccaaagcatttcgttgctgaagaatccggctggaggcctgatcgtgcagaatgtcgtcgaatatgcgaaatccttggaaatcgacgtgaacgaagtaatgagctatcttgcactgcaagagctcgcccattcgcgcctgtacgcttccgtgccgtggctgatgccacgcttcgaggcgctgttgggcaagtatgcccgtggcaccagcatcgatttggacgccatggaggagcagatccgcgatgcgcagtccgtcgacccggattccatggccgacgcggtgaacatcaccaaggtggcgttccctgacacgcctgaacaacagcaggccatgaaatcgctggagaatctgctcgccttggtagagggttgggtagacaccgtagtgtggcgcgccggcatggctcatattccgcatatcgaacagcttcgtgagatgctccgccgcgagcgcgccatcggaggtcccgcggaacgcaccttcgaaagcctgatcggcttgcaattacgcccgaagcgcatgcgtgaagcggccgcattgtgggataacatctgcgctacggaaggcgcgcaggcacgagacgcgaaatggtcacatcccgatctactgccgcaactgccgaatgatgacgatgacaacacctcacagtcgcagaacaacggatcgtcggaaaacacggaaaatacgacgttcgccgcttccaatgccaccgatatggcgtcgcagccccttggcgacgccgatggcatgaccatcgattgggatgccgaactcagcaagctgcttgacgaggaagagcacaagggcggcgaatccgataccaatggcagcgactctgacgattccgcagaatccggcagcaacaacgataccgacgccgagtaatcgcgctattccgttcgcagtatcagcggaagaagcgcgacacccgtcgtgccctttcaccctcattgccttcacgggtacgcgcatatgagacgtcaagcgtgtcttcggcgcgcgtcacggccacatacatgagccggcgttcctcctcaagcacgtcgtcatcctgcggcaacccatacggtatgagtccttccgagcagccgataaggaacacgtgcttgaattccaaacctttggacgcgtggatagtggaaatggtcacgccgctcagatccgcgccgacgcccaatgcctccaacatggccagtctggtctgcgtgtcgtcggaaagtgcggaattctgccatccgctatccctgcgcacgcgatatctcaaatgctgttcggccaatgccttgcacaggattttctgctgcgcgttgactctggtgagaatcgcgcaatcggccggcgactcccccgcatccaccagtttgcggatgcgcgccgccacaccttgcgcttcctcccaatcgctgccatatatggtttccacgaccctccgtcctttgctcctttcagagctgagcttcagataatcggcccgttgcggcgatgccgcaagcacacgattggcatagttgacgatctgcggcgtggaacggtagtcgttgttcagattgatgtcagcggtgagcggaccgaattccgaatcgaagttgagcagactgtagctacttgcgcccgcgaacgagtagatggtctgcgccggatcgcccaccacgcaaatattgcggtttgagccgagccatcgggtgagcagacggtgctgcaatggcgaaacgtcctggtactcgtcgacggtaagccatctgatgttggagcggatggctgaggccacttcctcgtcgctttccatcagatgacaaacgatcagcagaatatcgtcgaaatcgatttcgttgcggttggttttttctgcctcatacgctttgtatacgtctacgaattggcttggttcgaggcctgatggcggctgtcgatgcgttgccgcgcaaacccgcgcgtaatcttccggtgcgatcagtgagattttgcaccagttgatttccgcttgcaagttacgtatggtgtcgtcatccacttggaaggcggtgacgcggcgcagcgagcgctccaccagttcacgtggatttctggaaatgaacggcatcggcccctcgcatacgtccggccacacttggcgtagctgatggagggccgcggagtggaaggtggctgctttgacgtcggctgcgacatcgagtttcgataggcggctacgcatttccgccgccgctttgacggagaatgtgactgcgatcgtgcttcgtggattccacgctttggtggcgcacgcataggcgattctgcgggtaacggttcgcgtcttgcccgcgcccgcgcccgcgatgatgcgcactggaccgtccacggccgttgcggccgccctttgcgcctcatccaatccgtcaagaatctcttccgctgttgcactcatacgttccattgtggcagattgccgtcgccatgtgacgatttgcccgcggttcacctgcagttttactggcaagtcggcaacgcttcgcccctattgtgtattaaggttggaattgtgaccgaacgaagcaaatttatgatagctgccctgacgagtgcggcgatgccgaacgccgccattgcgggcgcgcgtgccagcgaacagaccaacccgaccgacgaggggtacggcgtcgaccatgccgtggttcaggatgcagcgggcaagctgtatgacgtgttcgcatccaacacgcctgaaggccgtaagcgtcttgccggtcgcgtgcgcgctgcgcagacgctctcgcaagcccgcgaattaggcggattgggttttgccgtcgatagcatagtagctttttcaaacggcgatttgaagcattccgccactggagatacgtccgtgctggtggccacccaccatgtgggtcaggcgcggccgttggagctgctgactttggatgattgttccagcgtaggcaccgctttgggcgcgattcatcgccttcgtcccgacttcctgcaggaagcgggctatccgacgtttgtcaccggccagattcgcgctcagctgaccgcttggatcaagcgcctgcgtcaggctggtcatgttccgcaggagatcaccactagttgggcgaatattcttgagaccgacggcctgtggtcgttctccacttgcccggtgcatggcgggttgcgtgacggcgatgtgcttttttccggttcctccatcaccgcggtcacgaattggcaggatatgcaggtcaacgatcctgcccgcgatttggcttggattttcgccaagcttgacgagaaccaccgcaatgccttgctttccgcatacggtcgcatgttgggcaatcgtttggatgatctgattatgctgcgggccaatctgtggctgcagatggagcaggtcggcgattttatttccgctttgaacaaggcagacaacgccaagattatgcaattcaaggcgcaggtggaacgcctggcccaccagttgggtgtcgccacagcgaagaatcgcgtgcaaactgaaacgaagcaggagtccaaggatcgcccccagcgcccgccgagcacaatcaccgtaggcacgttgctgaacgaatcggagcgtcgccgtaacgcggccgcacagcagaatgattccgacacgaccggcgaacgtcatgttgacgctgtggatatggatgattccactggcgatttcgacgtgaccggcgatttcgacgtgaccggctcccagccggtccgcaagacgaaggaaatcgtcaacgacgcgacggaagcgttcgtaccggccggagcccagccatcacaagcaccgtccggcaatacgaatgaacatgaggcgacctcggtcagcactttcattccggaacattccgcaaaagaacggcacgaatccatgccgtcaagttccaccatggtaatcagcaggctggaaacggccgacgacaacgacgatacgaacgaggaatcgattcccgcatcgcacagcgaggccgcgacagtactcattccactgttggagcgagatgaggcgaccatgcagaaagcgcaggcgcagatcaatcagtgggaggcggaagacgccaccgatgagaagctacgcgtagaataggcgcacataacccgtacatacacgtgcgcatgcattgcgcattatcacgaaggagcatccatggatattgaactcggcattcagaatgtggcccgcaccgtcaccttcagcaccgaacagagcgccgatgaggtcaacacggccatcgccgacgccgtggagaacggcaagaccatcaatctgacggacgacaagggccgtcgcatcgtggtgccggcaggctcgctcggctacgccatcatcggttccgaaaccaagcacgccgtcggtttcggcaacctctgacccgttcgcatcaccagatttcagcttcgaactgaaacacacgttttcgacgtcacaagaaaagccagacgttcacgtctggcttttccattttgggcgatcaactcgttcctggtttcatatcgcgattacgcatcgatgattgcgtttcggttttttattttcgccttcgacgattctttgctcaagtgaacgcctcgattgatgatttcctgaaccgtttcgtcgctggtgaggttctcccccagcgcgttcggcttgcctttgccgtgccagtcggatccgccagtcaccagcagatcgtgccggcgcgcaatggtgagcagacgttcacgctgttctgatggattgccgcgatgccacacttccaaaccgtccaagccttcggtgatgagagattcgatttgccggtcggtcagtaatgtccgattgcgccgggggtctccggcgtgggcgataaccaccaccccgcccgcacccttgaccgcggccaccacgtcgtgcgtggtcggtgatggcgtgggaatgtaatatttcgacgttgcgctcaccgcatcggcgaaagcgtcggatcgtgtttcatatacgccggcagccaccaatgcgtcggcgatatgcggccggcctatcgtggtgcgtttgccttcacgcacctgcgcgagcacatcatcccacgtaatcggaaaatcctgcgccatcagttcgaccatgcgcttggttctacgcagtcgcgcctcgcgggtggacgcgaacatctcgctgatatcggcgttcagcggatcatattggaatgcgagcatgtgcacggatacgctctcatcgacggcagtgatttccgtaccgcgtaacaacggcaatctgacctcccgcgaagcagccaacgcatcctgccaaccggaggtcgtgtcatgatcggcaatcgcaacaccatgcaatcgcaatgctctcgcttcctgcaacaacgcacgcggcgtttccgtaccgtcggaaaaaacggtatggcagtgaatgtcccaaccttcagcgggcggtgccgcagtgcctacgcgaatcatgtatccatcgtaagctgtttttggcgcgactcggcacaataccgcgtaaactaggcgatgacaacgtttgtattttgattcaaggatgcacgatgagcgatttttccggcgaacaggttgccgaagccactctcgacgatgattatacgaagccgcgcggttggcggcataccgcgacatggacgtatctagtcatgctgatcgcctcggcggtagcgctggtcgtatcgttcgtgctttccgccgagacactgaaaatggcgcgcaatcccggtcagaagctcagctgtgatgtgaatgccgtgatgtcgtgttccgcggttgcggaatcgtggcaggctgaggttgtgaagttcgccggtttgagtttcccgaatgcgttcttcggcatcgccgcggaatcagtgttcgtaacgatcgcggtgatcggtttgacgaaggtcgccgtgccccgctggtttgcgtcgtgcacatggctgggtggattggccgcgctggcttattcgtattggctgacctcgcagtcgttgtttgtgatcaacgcgctatgcccgtggtgtctgtgcctgatgttctccaccaccgtgcagttcatggcgttgtctcatgccacggcggtggttcaggagattccggccaagcgcgagggcgtacgcacctactaccgtcttaattacgatctgatggtcgatgccttatggatcgtgacattgattgtgatcattctcgtcgaagacggccccctgctgttcagttgacgtcaagtaacgtccaatcagcagtagggattcactcgcctacaagagaagccgactggaaacagccggcttctttcttttgcgtatccgcaaatttcagtgttatgcgcaaaaccttacagcagttcgattttgccgacgatggtggccgatccggtgagtttcacgtcgttatcggtcacgtcgacgcgcagggtgccgccacgcacggtgatcgtccaatggtcgatgccggttttggcacgcaacgtgatggcggtggcgcacaggccggttccgcacgacagggtttcgccgcagccgcgttcgttgacgcgcatggtagcgttgccctcgttgtcgccttcgctttgctcgtcgatgcgcacgaactcaacattctggtcgctttcgattcggggcgcgaccaccggcttggtcaccaaatcaagctgttccaccgtcggcaggctggagaacgcgtcttcgatgacggccaccacatgcggattgcccatgtccacgaacgtgccgcgtgcggaaccggccgtgccgggaatcgtcacttcgtatccatcaagatcgccacgcttccatgaacccatctcaacctggaacacgtccttgccaagagtcggcacatcgccaagtgaagtcagaaccttcacaccggcacgggtgccgagacggaacggttcaccgcccggctgaccggcaataccctgccgttgcgcgaacagagtgatcgcacgcgtgccgttgccgcacatctcagccaacgaaccatccgcgttgcggtagtccatgaaccaatccgcattgtcggcagcacaaacggcaatctgcttgtcgttcaaatcggacaccgcctgcggatgagtaaggcggatcaagccatcgccaccgataccgaaatgacggtcgcacaggaatcgcacttcatcggcggtaggctcgtacgtgccttcggcgtccagatacaccacgaaatcgttgccggtggcgtgcgctttgtaaacaatgcttggaatgctcataccgattcactctacacgcggtaggctattgaagaagttggacgcaacacgtgtgcattatgttgcagtatgttggcgtgcggaacaagggaggacgtatgacttcaacggcaccaatcggcgttttcgattccggtttgggcgggatttccgtggcgcgcgaaatccgccgcgatatgccgaacgaacgcgtgctgtattttggcgattccgcgaacgctccgtacggaaccaaatcacctgaacaggtacgcaagctgtccgacgccattgtgaaacgtttcgtggagcagggagtgaaagcggttgtcatcgcttgcaataccgccacttccgccgcagccaacgagttgcgcgacaaatacgacattccgatcattggcatggaaccagcgctgaaggtggcgtgcgatcgaggccatggcaatcgtcagcgtgtcatcgtcgcagctactcccctgacgttgcgggaacgcaagttcgccgtgctgatggatcgtttcaaaacagaccatacgatctttccggaaccctgccccggtttggtggagatcgttgagcacggccaactcgacgatcacgatgttgtgatgcacacgctgcaccagtatttcgaccagtatgatttgtcgacgatcgattcggtagtgcttggctgcacgcatttcgtgttttaccgcgactatttccgcgaactgctgcccgacacagcggcaatcatcgacggcaacgaaggtaccgtgcgccatcttggcgtagtgctcgaatcgttgggcaaactctctccggaagacgcggacggtggtatcgagctggccaattccgacacttccacacaaatcgcgcaattagcgcaatcgctgcttgatcgctgagcgcgaatgttccgatagaccgcgtaaagtcgattgaaacccgcaaaaactgctcaaccgttatcagacgtacaacgacgaagtggcgctggccaaggaatacgagcaggacggccgcgtgctcatcctcgcgccggaaagcctgtacggcctgaacacgttgagcaagtcgttcgaaggtttggaacgcatgtaccgcgcgggctatgcggcagtcgaggccatccccgcattcctagaaagctgaagataacgtccatatccaacgcctgccagcggttcgttttcaaattgagacatgacacgaaaattttataaaactctcatattatgtcctattgttttttcgtcgacataatcggcggaaaagtcgacattaaaggagaatgaaatgaagaacaacacattccggcgtctgctggccatggccgcggcgggtgccatgctgacgtcgatcgccgcatgcggatcgtcttccaacgatgacacagcctccaacggctccgatagcacctcgctgatttcagtgaacaacagcgaaccgcagaacggtctaattccaagcgacaccaacgaaatgggcggcggcagagttattcgatacctgttcgaaggtctggtgagcttcgacgcaaagggcaagcaacatctcgaagtcgccgagagtatcaccccgaacgaggatgccaccacgtacacaatcaagttgaagaaaggctggaagttcaccaacggcgaggcggtaaccgcccattccttcgccgacacctggagtttcgccgccaacgtgaagaacgcgcagaagaccgcaagccgattctccaccatcaagggctatgacgaactgcaggatccgaacgtcgatccgaaggccacactttccggtctttccaccccggacgactacacgctggtcgtcgagctgaacaagcctgattccgtattcccgaccaagctcgcgcaccaatccatgttcccgctgccaagcgtggcatttaaggacatcaagaagttcggccaggctccgattggcaatggtccgtacaagttcaagtcctggtcccacgacaagaacatcatcgtcgtaccaaacagggattataagggcagccgcaaggtgtccaacaaaggcatcgaataccgcgtctacacgaatgaggattccgcttactccgacgtgctgtctggcaacctcgacgtgatggatcagattccacagtccgcggtgaagaccttccgtcaggattccagcgtgatcgcctacagccaggcaggatcctcgttccagtccttcgtcattccggaacgtcttgagcatttcggcaacgacgaagaaggccagttgcgtcgtcaggccatttccatggccatcgaacgcgaccagatcgtcaagaaggtttacaacaacacgaagaccccgaccaccgatttcacttcaccgctcgtccccgaatatgtgaagaaactggaacagaacggcagcaacctgaaatacaacgcttccaaggccaaggaactctggaagaaagccaatgccatcaagccgtggtccggcaacttccgaatcgcctataacgccgatggcggccataaggaatgggtcgatgccgtgtgcaaccagatcaagaacacgctcgacatcgacgccgctggcgagccgtacgccacgttcagcgacgtgcgtaaccaggtgaccaaccgcaccatcaaaaccgcgttccgtgccggctggatgctggattacccgtccgctgaagattatctcaatccgctatatgcctccagctccgctgacggtcatggttcgaacgatggtgattacaagagtgcggaattcgacgagctcctgaatgccgcacttgcccagaccgacgtaaagaagcggaccgaggacttcaccaaggcgcaggaagtgctggccaaggatcttccggtgattccgctgtggaacgacaacgtcgccgccgcgtccgcgacgaacgtgaagaacgtgtcgttcgattacaccaatctgcctacctacaacaccatcactaagtgatgtttctggccggcggacgaacgattcgccggccatatagggagctcaagtacagtggggttcgaatccttcatggattcgaaccccactgtacttttgtggcttgttttgccggtttgccactacagcatcaactctgcacgtagctgcccttcggagacttccaaccgcagttcatcatctcgctattgaacaccattgcgccttcaccatgagccggaacgacgatcataccgccatctccatgatgacgggcgacaccatccagcgccgccttcgcagcctcgatcggctcctccttggcgtacagaacacgatcggaaacctgatgcgcagcgacttccttgacgaacgcttcaccgatgccggtgcaggagatcgcgacggaatcgttgttggcataggtaccacagcccggcagaggcgaatcgccgacgcgtcccggcatctggttggtgatgccaccggtggaggtgccggcagcgatgttgccggacgagtcacgggcgacagcgccgatggtgccatgcttctcccattcatcgccgttggattgcgcctcgcgcaaggattcctgacgtgctggagtgatgaaatattcactgtcgcacagttcgattccccactccttgagcaaatcattaccgggcttggcaaacatgacatgcttggtcttttccttgatggcacgcgctacgttgatcggattcttagacgtggtcagaccgcacgcggaaccaacctcgccatcgacaccagtcatcaggcaggaatccatggatacgatgccttcactcgtcaatgcagcgccacgaccagcgttgaactccggagcatcctccataacacggatagccgcgcacacggcatcctccgccggagccccctgctccagcaacgcatagccagcttcaagagccctgttcaaatcctgctccacctgggcacgacgttccggcgtatcctttttgccacgattgccggcacccgcgtgaatcaccagcagaatcccgtccggatcagcttgggcgatgtggaccgtcgactgaggcagtgcagcttcgttcattgatatcttctccactccatttttattgattattcgcagatatcttacgtcgtccttcgataagaaatgaccgaacacgcaaaaatacgtcaattagaccgcgtaaagtcgattgaaacccgcaaaagggacgaacggcgaaaggacgggacgcatatggctcacaggacggcaatgatcgacgtcggcggcggtttccgcgcgatctacggtgcgggcgtgatggaccgcatgcttgaggacggcatcagcgtcgaccactgctatggtgtttccgccggcagcgccaacatggtttcgttcatcgcgaagcagcatgggcgcaaccacacgttctacacgcagtacgcgttccgcaaggaatacgcgagcttcgacagctatgtcaagaaccataatttcgccaacctcgattacgtgtatagcacgctcagcaatcatgatggcgaaaatccggttgactacgcggctttcgaagccaacccgaccggtttcaccgtggttgcgtgcaacgccgaagacggctccacgaagtatttcggcaaatccgacgtgggctacgacaatttcgacatcctgaaggcgtcatcagcggtgccggtagcttgcgaaccgtatgcgatcgatggcattccctattacgatggcggcatcgccgatccgattccggtgcagaaggccatcgatgacggccacgaccgcatcgtggtgatactcacccgtccgaaagacaccgtacgcgaacagaagagggatatcggccccgccaggattttgaggcgcacgcatccacaagccgcggaaaaactgctcaaccgctaccagacgtacaacgacgaagtggcgctggccaaggaatacgagcaggacggccgcgtgctcatcctcgcgccggaaagcctgtacggcctgaacacgttgagcaagtcgttcgaaggtttggaacgcatgtaccgcgcgggctatgcggcggccgaggccatccccgcattcctaaaaagctgagcactaccctcatatgaacactccagccgatagcaacacgcgtgaaaacgccaacacgaacaccgacatcagcatcaccgcgaatgccacgggattcagcacaaaaacactgaacccgcagattctggtgaccttgtggaacgtggagcgtttgggctcgttctccgcggtcgcgcgtgaaaccggatggtcgcaaccggccatcagccagcagatccgcaagatcgaacgtgaacttgacgcaaaactcgtgcagcgcacgtcgcatggcgtggaattgactccgatcggccgtattctggcacgtcacgggcagcttatcgacaatcgcgtcacccaagccgtcaaagatgtggaagagtaccagcgcaacggatcgacgcatattcgtttggtcgctcctccatcggtatgttcgtcgttcgtggcacgcgttctcgtgcatatcagcaaaacgtccgacattcgcgtgagcctcatgcagatggagccgcctgaggccatggaggcgttggaacaggggcttgccgattgcgcgatcatcttccaatacaattcactccccgctttggccggaccggacgatttggaagtcgctcctttcggcgtcgatccgctgatgctgctgatcggcgcgaacaatgcgatcgcgcgccagtacgaaagctcgcacctgccggtccaattggtttcggcacgcagcgaacagtggatcgccggctgcgaaacctgccaggcgaatctggtgtcgttggcgcgtgccgccggcttcacaccggaaatcacacattcgaccgacgatttttgggccacgcagaatctggtggaagttggcatgggcgtctcgatcgtatctcgcttagccacaaccgctggaatccaacccgatttggccgcactgccaatcgccgacaacaacgcattccgcacagtctgtttcgtcacaagaaaagtggacgaccgaccggcagtggcccgcgtcaaagacgaaatcgaaagggcgtcacaccagtatttggaaaacatttgattcatcgtttgatatccgtgcttattcgcaatcgcggaatactgcagcaaacaattgtttccagtattttgctatatcgtcataatcagattaataattgaatagcaaaagcatctgatataagaaaacttcataacagtctttgctttcagtacaagaacacactgttcgtgcaagcatcggtacgtcatgctggaaccatggaagaaatcatggaaatgaagcatcgtaccggttccggctttgacgccgacgccatcgaccacaccaccgcagccgatcttgccgcagtcggctccgacaagtggacacgctaccccggctgcattggcgcgttcattgccgaaatggactacggcttggctccctgcattcagaaagccatcgacaacgcctgcgaccattgcaaactcggctacattcccgaaccctggaaacagcgcgtggcagaagcatgcgcaggatggcaacgctcgcattacggatgggatgtcgatccgagcattattcgcgtggttcccgacgtactcgaagcgtacgagattttcctgcgtgaactggtcggtgcgggcaacagcgtgatcgtgccgacgcctgcctacatgccgtttttgagcgttccgaaactgtacgacgttgacgtgatcgaaatcgaaatgctgcaaagcggcgacgccgaaaccggagaggcgcaatgggtgttcgacttcgacgccatcgaacgcgcgtttgcggccggatgccatgcgttcgtgctctgcaacccgcacaacccgatcggcaaagtgctcaccttggaggaggagctgcgtctgagcgatcttgcggcacagtatgacgtgcgtattttcaatgatgagattcatgcgccgttcgtgtttgagggcaagcacattccgttccccaccatcagcgagcaggccgcattacagtcgatgaccgctaccagcgcgtcgaaatcgttcaatattccgggcacgaagtgcgcgcaggtgctgcttaccaatcctgcggatcgtgacatgtgggcggtcaaggcggagtggagcgaacatcagaccgccaccatcggcgcaatcgccaccaccaccgcatataacgaaggcgacctgtggttccaggatgcgtttgcctatgtgtgcaggaatttggcgttgttcgacgagcagatgcgtgaaaggttcaccggcgtcggctatatcaaaccgcagggcacatatatcgcatggcttgatttctcgccgcttggcatcgacgatccggccgcatactttcttgagaaggcgcaagtggcgttgaccgacggacgttcatgcggcgagaccggtgccggatgcgtgcgcgtgaacatagcaatgccgtatccgctgctggtcgaatgcctggaccgcatgttcaacgcattgcacgccgacggattattgtaggcttcgccacatattcagtgttttcctcaaccaacggcagcataacggtgaacgtcatgcccttccccacttcgctgtccaccgttatggtgccgttggaaatctgcatactatcgacatgcgatgggaggttgacatgcgtttgaacgtgagtaccagcattgagacggccgcctgcgaaatagccggcgatgatctgctgttcttgggatttcatggattcagcaatgatgaaaatgagatgatccgcattattgatgcgatttatgatgctccgaagcaagacgcatcttcaacggacaactccattgctcctgcccagcatccgaattatctgtcgttccgaggcacgtacgaacgtccttacatcggaagctactactggtatccggatggatgttccgtaggagagcgtcgacgcgagtgcagtgccgtaggcgacgccgtcgtacgattgctggattcgcccgcatacgcgcatttccgcaaggtactgatcgggttttcgcagggcggatacctatcgtatcgcatggttgcggaacatcccgatgcgttcgacatggcgattctgatgagcccatcattcaaaggcgaaaccgctgagcctttgcccgcgaccggacgcacgcgattcgcactctgttacggcagcgaagaccgcacaattccactatccgaccaacagcgtgcgcgcaacaaacttgcgcaaaccggcaatctcacgtatttcgaatatccgggaatggtccacggcatctgcgatcaggaaattcgtgacctacgcgcctggctgggattgtgatatgcgctgcgtgaggagttctgcgcatctgagactccgcacgcgtgcccataaactcgttttcaccccctcggattgtcattgaaaccaactcggaactcttgatacaccctaatcgtcgaaatttatggacatacacccagttcatctgaactgaaccgcgatatctggcttatatatggcagatttggcatcttgacctgaagtttctcgctcatatatggcacatgcccttcgagaaaagccacttagggggcatgtttttgacacttttcgcacgaacacctgccatatataagcgagaagcctccgtacgaacctcaaaatctgccatatataggcgagataggcggcataattaagcattttccctcactgatgagccgcagaacaaaccagacgaccgaagttttacgatgttatgtacgtcaagctcaccacgaacatctctccacatatgtcgcaacaatatggtcagcgatcgcccttttccaatgctcgggcggtcactgcatgatggtcgtaaagtcaagcttatgcgggttggattgtcagcctgccgccgagagcgtgcacgatcccttcataatggtatggaagctcgggttgacattcctgtcgaggctcttgtaaagactttcacgtcccacacccgcctccttcgtgatctgccccatacccttcgctttggtcatatcgccgattacggcctgccgcaacgccgaatcgtcaagctcggccaccgataaagcagcaacatgagcgagtcgctcttctgcgcggagcaaacacggtagccgggaccgaaattgaacctcagcgcgctggccccgtcaccaaccgtatgcaggtcacccaccggccgccccatctagaagcgcaatcggagtctcgcgctgattcgggctttcgcgttccggtcctttatccggctgaaccattggcgatattcgccagtcatatgtatttccatatgacatgttgcatcccatgagacacaatatgtctagcttgacgaccactcacgagatgaacgaccaaagtaaaacagaaattcgacaggttagccaatttctcgtgcatccgcacccacccgaccgttttcacatacactatttcttttacatagctttcagaagcgaccccatgcgaaacacccagtcgcagttcctgctcgtattaccgttgaagtcgccccgagcggacaaaaaccctggttttccgttgctagcagtcccgcacatgtggaatcccgcatgtgcggggaacactggacataaacagggaaagcaacatccacgcggcggccggaacgatgcagacaccgatttcaatccacgctctccatgaggagagcgactgatacgacgctcgaaaatcatcttaatcgtatcatttcaatccacgctctccatgaggagaacgaccccttgtacggcgcgaacgcactgctcccagctatttcaatccacgctctccatgaggagaacgacggggatgcggtcgaggatcgggctgacctgcgtatttcaatccacgctctccatgaggagagcgactcgttggcctgttgcttgatggtattgtccgacgtatttcaatccacgctctccatgaggagagcgacctgagctgcctgcacctgcacggacgcggccttatttcaatccacgctctccatgaggagagcgaccgacgatgatcctgggcagcgccatggctatcgtatttcaatccacgctctccatgaggagagcgacatgttgcgggagtcggaggcatacggcccgtcttcatttcaatccacgctctccatgaggagagcgacttccagacgtgggcacggcgtagcgagtcgcatatttcaatccacgctctccatgaggagagcgacaccataaaacggtgcacgcccctacgcttgtcgggatttcaatccacgctctccatgaggagagcgactgttcgaccacgccacccttaacgaggatggtatatttcaatccacgctctccatgaggagagcgactggcagccacggtcatcaccatgctcccttcaatttcaatccacgctctccatgaggagagcgacatttggattccgtcaggcaggtcgccgatgcggcatttcaatccacgctctccatgaggagagcgactcgtgcgcgaggccggcggtgcggcggctggtatttcaatccacgctctccatgaggagagcgacagcagaacgtcgagaacaccatcaaccagaaccaatttcaatccacgctctccatgaggagagcgacgctctacgtatgagcaggcggcagtcggcctagtatttcaatccacgctctccatgaggagagcgaccggcgattatgtcgatattgacgtattgttgcttatttcaatccacgctctccatgaggagagcgaccggtcatgacgtcatactccccattattttttaatttcaatccacgctctccatgaggagagcgacacgacgacaatcaggttttgcgcttggggattattatttcaatccacgctctccatgaggagagcgacttccatgtaagcgttacccaactggatatcgtgttatttcaatccacgctctccatgaggagagcgacttatccgattttcgacgaaaactatagagcgagcctatttcaatccacgctctccatgaggagagcgaccggcgcgtacggggcgcaatgctgggatttatgggcatttcaatccacgctctccatgaggagagcgaccaaaatcatcacgacaaaaacgcagatctggaatatttcaatccacgctctccatgaggagagcgacgagactgattccagctgacgtgctcgaagccatatttcaatccacgctctccatgaggagagcgactcatgtcaaagggctcggcgttaatcccgatgaatttcaatccacgctctccatgaggagagcgacagaaccgtctgggcacgtcgaaccggaacgcaatatttcaatccacgctctccatgaggagagcgaccaacctcgcgccggaaaatcaacctcgggtggaaatttcaatccacgctctccatgaggagagcgacgataagcacgccggtaaattcgtcgcgcaagtatggatttcaatccacgctctccatgaggagagcgactggataacatttcggtgccgttgattatcgccacgtccatttcaatccacgctctccatgaggagagcgacggtgctccagcgttcgacgaacgccttgccgtaatttcaatccacgctctccatgaggagagcgacgtatttaccacgggtcggattatacgtaaggtcaatttcaatccacgctctccatgaggagagcgactagactcatcgaccttgatattcttgttaccttatttcaatccacgctctccatgaggagagcgaccggaagagtttgccgcaccaacgtcagcggtgtatttcaatccacgctctccatgaggagagcgactgtggtcgccacctattccaacggccagaccgtatttcaatccacgctctccatgaggagagcgactgtgtcacggtacgaaaatggctgaaccgttgtatttcaatccacgctctccatgaggagagcgactggtaggaggctgcaagtgctcaataaaatgaggatttcaatccacgctctccatgaggagagcgacagtcggtttgtgatgctgtggtggcgtatttgcgatttcaatccacgctctccatgaggagagcgacagtgcagctggacatttttgtccgctttttgagacgcaagccagctgcctagctttaagcatatcaaacaacaccgccgatacgacgaacaacatgtctaaaacgagcaactggctttctgtctcattttaatgtccattatttagttttcaaaacgccccacgaaaatcacaattcggatttcgatagtttttcaggtgcgaaagacgtcccttatcatgagcgcttacacttcgcacaaacaccattccaagaccggccaccttgccgaaaacacaatactgctggctagaaaacacactctgaataccggacggcacactcaaacgctcaacccagcataccccacaccatatcgttatggcaccatgccattttgcctgtgctatatcatcatcacatcattaaccggcaaactccgttcacgtccataatgctcaatcctatccgcatatcgagcgccaagtttataaaagcgcaggctgtcctcatcggtattggcaatcttcagcaaatcgtgcaccaacaccagataatcggaaggactcaccgagcattcgaaaacactgttctgcacacgctgtccgtatttcacgcatgtcttcgccaccaaacgaagacgacgcttcccctcaggggtttccgtactcacatcgtacgcaaccacaaccatcatggtttttcacctccaataacgtatcaccacgaatcatcgcataccgccacacacagctacgcaccttttacttccacataaatggcgggtaatcatcaagatcaccccgcaacgatcgagctagcagcagcgcttgcacatacggaaccaacccccatgaaattttttcttgcaggaacggatgaagaatctgatcgctcttctttttctgccacgccgtaagcactttcttccgcccggaatcagacagcagcacaccaccattctcccgtatttcaaaatcccccggcttaacagcgcctgtattaaccaatgtcagcacaaagcggtcagccaacaccgggcgaaactcttcaaccagatccaatgccagagaggctctcccgggccgatccgtatgcataaaaccaacatacggatccagccccacgccttgcaaagccgcaatgcaatcattcgtcaatatggagtagcaaaaagacaacaatgcatttagtctgtccagcggaggcctcctcgacctattggtgaaaaagaaatcatctttattcttcaggaccaaatcgtcaaaagcgtagaaataatctttggcagcaagcccttcgacacccctcaactcatcaaccgtcaaacttttccgagcttctaacaatgccgccgacaatttgccactctgctcggcaagtcggtcaatatttacccgcaaagcatgatcacgtttcgtacgttcgagcacccatttcgcattgtaaagttttccaacaatgaaagatttcgcgtaacacaaagatttttgttcgtcatccgcgactcgaaattgttcacggcgaagtagcacattacgattctcctcccctaacacggaacagtaataatggcctctcggtgaatagaatgccatagaaacgcccagtttgccgcagcgccccataagagcaggcgaagcacccttatacgagaaacacatgattccctcaattgaccgtaacggcactttcgccaaggttttgtcattctgatgaatcacaacattgtcgttctccaaagcaagataggcatcttccgtcatcacaaacagcgtgtttaacagctgcttcatcactccccgctttccttgagccgttcttcgatatatgcttttgccgatttcaccttccgtaattcaggcaggcacaaatcccgtagagaacatgacgaacacgatctggtctgtttcactttaggagtccatccgcgggagaaaagatcatgcatttgcaagaagtcagcttcgaccatgttgcgaagatcttcgtccaattttacccgctcacgacgttttgtctgccgatagaacaaagcaccttcaggaatatcacacgcgagcatttcttccaagcacatcgcttccgcgcatagctgtaaacgatcagcatcaatcgttttgtatttgccgtgtttgtattcaatcggatatggcaaccacaatccatctcttccgtgaagcggaacaccatcattagacttatggaattccacaacatcacaggctccagttatgccgagcgctcgcgaatagactctcaaatcccgcatgatcagcgtatcgccgcgagattcagaagtcgcataatcgtgggcgcgttcatgttccagatgcccagctgtggtcaaataattctctgaccacagctgttcgatatggataagagcccactgtcgtttgcagaatgagaaatgctggatgcccgaaagggccagccaatcttcttccggatatccttctggccctttcatgcaacaccccttactctctcaattccaaacgcttcagcgtccttcaatcacttcgtaccgcaagtcgggaatagaagatccattcactgccaccgttccgtccacattaacggaaacggaacgatgaactttggcggaagagtattgccctgacttgctgttgtgcgtgaaccacacaacgtccaacacttccatggaccccgcaggacgagccgaactttcatcattctcaaacaacgtgacgagagcttccttgattttttcggcgtcttctgcagtaaacccggttttttcggcaagctgtgggctgatgctgccatacgtcgcatacaccgcacggccggaaacacggtatttcattcccatggtatcggaggatttcttaccggtgtccgtggtttcactgttcactgacttagtgatctgcacgtcgtcaatggcgatgggttcaaccgagaacgcagcctgaatggaaaccggaccgcgcacgcccaaggaaacttcgtcaacatccttagcttttttgaatgcgaatacttgtccgaacgcacgtacgtcaagccactgttcgcacactttctggaacaccaggttcttctgtttctgctcttctttcggcaaggttttcaaatatgtgttgaaacggtccgacaatgattttgcgccgtcatcggaacggtcatcggactgcacgaaaatcgtttcaccagcatcttgcaggcgattgcgaatcttccttttcagtgcaacgtcagaaacctcgcccagcccttccgatgtggttcgtggacgattgccattcaacggatcaccattaggattggcattattagacgcaaaaacgactgcgaaatcaatcttgttttccaaagctgccatgatatgactccttaactttttctttgataatcaacgtcgataacttcaaaaactaaacactagttttctttgctcttctgggatgcttcttgcgctttacgcatagactcccttcgctggcatgaataaccgagcagaaagagcggtgaaagtgcacggttatcttcgaagtctccttctttgaaaagcgccatgacctcatccacgctgttctggaaccagggcgcgccattcgccgatttcaggtagggcatcagttgcttccacagcgttccccatgttgtaaacggctttgcgacgaaattgctcatgagcttaacggcattggtcggacgggtgtcactgattccttgcttatacaggacaccgttttcaaagcggtccgcgagtgccagcaatctcccgtataagtagtcgcggtcatttcgtgttggttcaaggtacatggatatcgtgtcctcctgtttgttttgcttcctcgcgtcgtcaatgtaatgttttttccataggctgcatgcgatttcaaaatctcttagccatgctcctggagcgtcatatcccataggtttagtgactctgtggtatgtggcgtccaatatgaagcggggaagcgattctcctccgaacatgcattctataagctgctttttcgtgtttttcgcaaaacgtttataggctttgctgcttctgtctgacacgtcatatgcgcagctgatgatgtcggcaaatggtggcgcaccttcatatgcgacaaacttctttttttctttgtcgtacattttcaacggccatgccgcatcaacatgccaccgcaggatactttcgacatattcgtcttttgaaagttcacggtaatatgtaacgctcaaacgccctgatgtcgccgcatccagaatgacaatcatcattgggtcggcatgctttttgagtttgttagcattgccatatccgcgtagtaccttcgaaaaaacttgtgcgtattgaaagtttgttgcggtcagcgcatctgcaatatcgttgcggggagcttccggctcgtccacatccgatgagaacaaagagccaaaatcataagaaccttcctgagggtcaagcttcggcttttcgttggggtttttcaccgagcagatgactatggcctgggtatcggtaatcgttccatgattattgaccaaccattgcagcgtcgaatgtatcttctgcgatgtttcaccatcgacttgcaaagcctcctctttggatgcgaagcgccctcgataggtgaaattcgttgaatcgtttgccgataacagtttggcgttgccatttacgctgacaattttcttagggaagttcaatatcggagcatataggtcctctccgaacatatccttcccttttttctgtcgatcatggtacaaataagaaatccattgcgcctgtatatcgggatcgttcgagacatctgagttttgcagcccaatttcaacttcgaagcaaacacctgctttccggtctttttcggttatttccacattgaatcgagcggcttcttcgctgatgctgtgttccgaaacgcatcgatagatggcattgagtttgacgttgtcgcctttccaagcggcaagctgctccaaatacatggaggttttctccttgtcgaaatgcaagtcgagatattggagctgatcaaacagaggatgcggtaccggcttgatggtgcgtcccatggaactttctgtgcacgggataacaatcgtttgtttttccctcagaagccgtagtatctcaccattctcgtttacccctagcgtcaatagtgtcggaagtgtcgtatgccccggaggaatcaaggctttcctaatgtcaagcgtagaaccgtcgccacttctcggaatttttccggcggcgttgtgcacagattcgttgataagcaacagattgttcgacaggctcatcactcactcctctcccaccggctgcagattgctccccaaagcgaattccttgacgctctggtttttcctgataattcgtccatccaatttcgtggattccggacgctcaaattcgatgatgccgtcggacataacaggcgaccagaatcgggcgataaaatcgtggtcctcgttttcatccggatacgtgaatccatggaacatgtatcccatattccactcgccataaccgtcataaaacccttcgccagatccgaactcacatggttccacatacccctggcactcgcgcgtccccaagaatatgtctcggcgaccgcctttctgaacggatctcaaggcgatattatgatgtttgttttcgtcgcggtcagcgacaagatcttcacgctgatcattccattcgaaatgagccaaaacctgataacgcacgtctttgagatacgtgtagtacgaaagatcattgccaccgctcattttgatgggtcgaattccctttccttcagtctgaactctgttcatcacacgaacagcgtcaataacccacataaaagttggcttccaatagatgctttccgtaatgcctttcaaagcttggtacgttggcacctgatacgaaaatttctcacccccaacacgtgttgctgcttccgagaacaacgcatatctgcctgatacctcatattcaattgagttgcgatgtcgttgcatataactccttcgttaatcgttccctcaaccagccactgtcaatatagcacattttacgcttattgtacatagaactctttgagtgtttctcaatcaacaatcaaccagttattcttgtataagtaggttttcctactgtcgccacattcatggcgtggattgaaaatatgtacaacatgcgtatttaccaaacgaaactctcctgcagattcccatcgacctgcaggagaaccactgccctttcatatcatcaacagagacatgtccgtctctgtcaccacgccatattcgcctttgtaataatctccattcagaacgcaaatatcgaaatcctcgctagcgatggaaatcgcatgtttttcgttcaaaatcttgtattcgtaatcgaaaagggaaaccgtgtattcctgtagccgccgcagaatcgcaatcttctccctcaactcaccgtgacccaacatatccagtaattccatcgcattgccatagggaaccacaacattgtgcgtgattttcggaatcacacgatattcattgccgaccgttttgaacgcctgggcaaaaaacggattgtatctctcccccatcgtattgttctcgaattgcttacgttggctttcgttgtatgccagcaactcataaatcgtttttccagcgttttcctttttccaaagcggaccatccagcaaactattgccgccatctcgatcctcactttgaagcagcatgccataaaactcattgagcatgccagtagaaagcagatcagcatcaggatgctcacccataatctgcaaagtgagctttttgcctctgtgaatctctggaagatagtccttgaacctttcctcaccttgcaacggatagacatacacatccttgatttctttcgattcaccattcctgttgcacctgccagccgcttgcataatgctatccagaccagccatcgccctgactacgcatgcgaacgaaaggtccactcccgcttcgataagctgcgtgcttacgcaaatcaccggtttggaatcatgaggatcagttaacacctttattctcgctaactggtctgccctatgtttgccacacatggcagtactcaaatgaatcaactcaaactgcccgtcagcattgagctcttgcaaacactgatacattttgcgcgcttcactcttcgtgttgacgatagacagacaattgccgttccgaagtgcctgctcatatatgatgttcgcaagttcctcgcaactcttgctttcctgtgaagcaataatccgggtacgcttgagcttctcttcgtaaccatcagtattgtcgataagatcaggctcgtctgacagacgcagattctttcgcgccgttcgttccaataaaggctgcgtagctgagcacagcagaatagtcgagtccaatatcgtcgaaagaaaactcacaacttcattaaacggattgatgatattcaatggaagcgactgaatctcatcaaaaatgatgacgctattggccatgttgtggaatttacgaagtttcgtaccacgcgccgacataaccgtttccaagaattcgaccatcgtagtcacgatgatcggattatcccaacgttcagacgccagtttacgttgacgttccttcgcatcctcttcctcacttgtgccgatagatcccgtgttaccggaattctgaaggcccgcggtggagtaatgctccagcacaatattgctgtcagcatccagaccaagcatattccggaatgttgccacggtctgtgacgtaatagacaagtacggaatcacataaatgattcgtcttttccctgtttccaaagcatgatgcaaggcgaaattcaacgaagccaacgttttaccgcctccggtcggaaccgacaatcggtaaatccctgtctctctgctcccagcttgacggcactgttccgtaatctgttgacggattttattgatttcggatgtcgaatcgaatgatttcatgctttcgtcaagacggcgaatcagttccgaccaatccgccttgatcggatgatattgctctttcgtctcaaaataagccgtatctgttctatcggcatcaatcaaacgagaataaacgtatttaactagtaatcccgagtagaaataacgactatctttcgacaatttcagcaatttagttcgtcctacaaaatcgaaaacatctttttcggcctgctggaaggtgtcttgcaagtcgaggtccaaatcatgtagcccctgtttgatttccccatacgcatatttaggattctgtttatctgcttccgtaaaacctgtgagaaaagcctcatcaccgatttcattgatgcaatcaggaagctctccatgatgttttgcaataacaagttcaagaatctctttcacgatttccgctgccgaattcgaaatcggcaggtcattgacgacgaacgcaccctgcctcgcatgaggaatctcaccacgacgtcccttgcctgatatcagatacgtttgaaactgttgcgcgacctttccaacatcatgcaggagcgccgccattcgcggaatctgagaaaactccgattcatagctttccgctaagtcacccgcattgtgaagatggtcacgcaacgtctgcacaccgccatccgcgtccttgtgcgccagcaaagtcataatctgctccttcacagatatgttcaagcacccctacattaccatagcgttacagttctcacgagcattgcaacgaggttcggcatatagagacagaagactttcaagtggaataatccgcatatacgcatactcattggtatacctattcatatctttccattttcaattccaaatggaaagatatgaatattttttgcgttagctacacttaaccgaataagtgtagctaaattccgcgttagccacatttattcgcacatagaaaaaaccggacagcggattcttggaatccacccacttgggcgaacccgttgaatccgccgtccggcggcgcgactgcttctcaagaatgtgtgcttgactcacatggatggtactgagaaccattcgcttaacgatctgtttccgtgcgcgccaaccgcgtaaggaacgcggctgcgcggcacggacacaaatcaagtcttgagtggactcgagccgcggtgggcaacgccacggcggctcgaaagccaagggattactctagccgcagcttggaataatcgcaagccgactgagcttcgttcagttcaggccttggcaacctccacgctgagctcggagccgccttccttcacgttgaaggaggtggcgagcgtctcggaggcgatgagatccttgaactgttcgaccttggccacgtcttcggcgggcacaacgagcttcagtgcgatgcggtcggagatctgcagatcggcggccttacgggcatcctgcacggcacgaatcacgtcgcgtgcatagccttcggcgatcagatcatcgttcagttcggtgtcgaggatcacgaagccaccggtcggcagcgctgcggaaacggagttggcggcctcttcggcgttcttctcctccacgctgttgatcagctcatattcgccttcctcaagcacgatctcaccgttcggagtctcacataccggagcaccttcggcgttcacatgccatgagccggacttggaggccttgatggcgaactgtacgtccttgcgcaggcgcttgcctgccacgcgagcgttcacgcgcagctcgttgatgatcttcaagccttgggtttcggcatcttcaagcgtgcacagttcaacgttcttcacgttcagttcggacttcaggatctcgtcgtatgcggccacggcgacagtgttctccaccaccacggtcagcttggacagcggctggcgcacacggatctgctttgtcttacgcatagacagggtgccggacacgacctcgcgcaccttctccatcgcgtcaaccagagccggatcgtcaacaagcacacggcccagttcgctcgcttcgccagtccgctcgtcggcaaggaacggccagtcggccagatgcacggattcgccaccggtcagaccacgccacacggcttccgcttccatcggagcgagcggtgcgatcacgcgcatgaatgcttcaagcacggtgtacagcgtgttgaacgcgttcgcatcctcgttccagaaacggtcacgattgttgcggatataccagttggtgagcatgtcgatgaagtcggacacggcttcgcatgcgtcagaaatcaggaagtcatccagcgaatgctgcgtcttttcaatcagtcggcgggtacgcgccagcagataacgatccatttccggcagtgcggcaacctcatcggcacgcagcgcacgagcatcgaaaccagcaccattattagcagcgttcgcatacagggtgaagaagtagtacgagctccacaccggcagcatgacctggcgaacggtgtcgcgaatgccatcggcagtcacgatcagattgccgccgcgcagaatcggcgagctcatgaggaaccagcgcatggcgtcggaaccgaaatcgttgaacactccgttcacatccgggtagttgcgcagatgcttcgacatcttctggccgtcggagccaagcacgatgccgtggcagatcacgttcttgaacgccggcttgtcgaacagggcggtcgccatgatgtgctgcacgtagaaccagccacgagtctggccgatgtattccacaatgtaatcgcacgggaaatgctgttcgaacgtttccttattctcgaacggataatggtactgggcgaagctcatggaaccggattcgaaccagcagtccatcacgtcgctgatgcggcgcatgtggctcttgccggtcggatcgtccgggttgacgcgggtcagctcgtcgatgtacgggcggtgcatgttgacattgccctcatggtcgcgcggataatcgccaaaatcagccttcagctcgtccaacgaaccgtacacatccacgcgtggatacttcggatcatcggaaacccacaccggaatcggcgaaccccagaaacggttgcgggagatcgaccagtcacgggcgttggccagccacttgccgaactggccgtccttcacattgcccggaatccagttgatttcctggttcagttcgagcagacgatccttgatcttggtgacggacacgaaccacgagctcaccggcttgtagatgagcggcgtggcgcaacgccagcagtgtgggtaagagtgtacgtagctcttctcctggaagagaatcgcgcgctggtcttccggaatacgctccaaaggaccgtcgccggcacgcaggttacgcaggatcggcttgttcgcatcgaacacgtacatgccctcgtagtccgggcacagcgcggtgaacttgcagcccgcgtcgagcacgtcaacgctcttgatgcccttggcgttgagcgtgttcatatcgtcctcgccgtacggagcctggtgcacgagaccggtaccctcaacggtatcgacatagtcggcggtgaagatctgatagccttccggacccggaaccttgccttcgacggcgttctcgtcgcctgcgaagtacgggaacaccgggtagtagcgccagccttccatctcggcacccttgagttcgcgcacgatctcatagttgtcgccgagttccttggcgtaggagccgagcagtggcttgcccaggtagaacttcttgcccgcgaacttgccttcggtcggacgcacttccacatagtcgatgtctgcgccgaccacgatggcgaagttggtgggaacggtccacggcgtggtggtccagaacaccgcataggcgtcttcctcgtcgcgcagcttcacggccacggacacggtggtgtcctgacgatcctgatacacgtcggcgtccatgcgcagctcgtgcgcggaaagcggcgtctgatccttcggacagtacggcagcacgcggtagccctgatatgcgaggcccttgtcgtacagctgcttgaacgcccacatcacggattccatgtatggaatgttcagcgtcttgtagccatgctcgaaatcgacccaacgtgcctgacggtgcacgtagtccttccactcgttggtgtacttgagcacggaggcgcggcaggcatcgttgaacttgtcgatgcccatttccttgacctgatcgaccgaatcgatgcccagttccttctgggcttcaagctcggccggaagaccgtgcgtgtcccaaccgaacacacggttgaccttgtggcccttcatggtctggtagcgcggaatcacatccttggcgtagccggtcaacaggtggccgtaatgcggcagaccgttggcgaacggcggtccgtcgaagaagacgaattcgttctggctgtgatcgccggaaggacggcgttcaatggacttctggaaagtatcgtccttctcccaataatcaaggacggattcttccagcttcggaaaactggggttaggtgccacattagcactctgctcacccgcagctgccttcggatacacgttgtgttcgctcaccgtatctcctcgtaggttcttactacttgtctcctacgaggacgatgactatagcgcctgctggacgccgccaccgcggtaccacctcgtttgccatgcttttgttacgcgcacgaccgctcgtatgttcggctgttcgggccttcccgccgggtctaataagtcgctgacacgaccgttcttccggaagctccccgctgataacggatcaccgctcgcatttcggttgtcactatagcatgcagcgcgaactattttcgcctgttttgcatgattatggacgattcacaatgggcttcatgacgattcacgataggtcttatacaggattacctacaacagaaatgccgatactgacagcccatcagtatcggcattgcaaacgtattttcaatatgtatttttagaaaatactatgttcgatcattcggagatttcaccagcggcaagcttggcttcgagctcctcgacgatctcgtcgtgcatcttctcggtgatcttcaccttgaagaggaacacgagcaggctcagcacgatgatgcccagcggcacgtagaacgcgcagaccttgaacatgccgatgttcgcggcggtcatatccgcggcggttgcgtcaccgatcatgcctgcggctacagcgatgaagccgacgataccgttggagcatgcgcctgcgatcttgtcgagcatcgggcggacggacagggtgacggcctcgttacgcttgccgttcttgagctggccgtattcgatggagtcggtcagcgacaggatggcggtcatctgaatgaaagtctgcggcaggtagaagaagaccagaccgacgatgaccattgccagattgctggagccgacggcgaacagcaggtagccgacgatcatgagcaccatgccacccaagtacaggtagcggcgcggaatgcgcttgttcaggatcgggtacagcggagccataaccaagccggtgatgaccgggatgacgcccacgatggagtatgcggcggtgttgtcgaggatgtacttgaacagatacatgagcacgccggtggtggccacgttggcgatggcgtacagcaggtagctcagggcaacccacagcagctgatcgttctgggccagagccttgaaggcctgcagcgggccgccgttgtcttcggccttggcacgcagcgtggtggtgctttccttggtgccaaacgccacggagcacacggtgaggatgccgaggatggccacgatgatggcgaagcaggtccagccggactggctttcgacgtacttgccggtgaacacccagctgaagtaggtgacgatcgggatgaccacgatggtcagaccgttgtagccgatggagccgccgaaggagccgagtgcggtgtaggtggagcgctcgtgggagtcggagctcaatgccgggatcataccccagtaggagatgtcacgcagcgagtagaacacgtcgagcacaatgaaggtgatgacgaacagcacgatgaacagggtagtattcacgttcaccagaccgaacagaccagtgtagacgagcaccagcaggatggcggaaacggtaccaccgatgagctgccacggcttgaagcgaccccacttggtgttggtgttgtcgatgatgttgcccagcagcgggtcgatgaagatttctgcgatacgaatcaccacgaccaggccggtgatgatgccaatcagcttggtggcgacgctcttatcgacgccagagaacagcgagctcgtcacgtagacgatgaaataggtgctcagtgcgttgtagaacgcggactggccgacgttaccgaacgagtacgccacgcgagacaagaggttcccgcctttggaaccgttgttgccatttcccatctttgcttctccttagaagtcagatacaggtccttctttgacctaactatcagtatatccccttacctgaagttagtaaaatttatcactgaacatatcgtctatcggcgtgtcatattttgtgagcttctgttcgaaagatagccaaaaacgttatttttccgccatttacacaacataataggcaaactgtcgcattatcttgtggcaacttttaccaaaatcgatatttacgatatgcaaaagcttccacgtcgaaacgaaaccaagccaatctggaaatagcccgattactatacagaagtaaagaaataaccgctattttgccggtacaaaactatcgcgcaccaccagcgacgtcgacaggtacgcatgctgacgaatcgtgcgtttgccggaaatggcatcacccaacatcagcgtcgccacgcgcgcaagctcgttctgatcgatggagaatgtgctcaacggcggcgaggtcaactgcgaaatcgtttgattgttaatgctgatcacgctgatatcgcgcggcaccagcacgccaaccgcattgaacgcctgcagcacgccaaccgcaatcacatcggcagctacgatcacggcatcaggcagcacgccattatgatcgcgcacgaattgctcccccaacgcacggccgttgctcacggtgaacaagccgtcggaatacaccaatccgtcggattgaataccgaaacgccttgcctcacgacggaaatatgtggcgcgattctcctcatcgacctcataaaagttcatcaggcagcccttgcctccgatgaatccaacgcgcttcatgcccttggcagcacaggccgcgaccgcatcatgcatggtctgctgcaaatcaggctgcacggaatcaaacagattcggcgccggattcacgtcaatgaacacgccatacggcatggccctatgcagccgctccaagtcttcctcgctgatctggtcggcgccgatcgccatgaacccgtcgaatttggaactgcgagcgatcatatcgtcgagattgtggaacaccgtcatttccatgcgttgctgttccgcattgcgttcgagcgctgaacgcaaatcggtgaaataggagtcccgcaacgcctcgtcggacttttcattgtcaagcaatgcaacctcatgagggatgacgatgcgcttggtctgcacgctatagccgaggtcctcgctcgcctgaatgatcttgcgacgagtctcttcacgcaccgatagggtgggatccccgttcagaagtcgagacaccgtagcctgagaaaacccggtacgttgcgcaatctctttaatcgtcaccatgtctcgctctccaatttagtaaatcgtttacccatgaaaggataacctattattgacataacgacaaaccaagcgagatttgtgcaacgattacgcaagccaattataatcgttgctcatgcagcagtctcatgaacgtatgacggaacagtcttcacggaaggcgggctggccgcagccgaataccatgcatggcaaagacaataagaaatcccttgcttcaaaatcgcaatttcaaagcaagggattttccagaggatccgtgccgttcaaagccaccggccataagggcggtatcagccgacagggatcgaagcgcggctgacgtgaaacgctagcgtgtgctcgcatcgctccaattcaggagactattcaattattcgagctctacggcacctgtgtaaagctggtagtactcgcccttctgcgcgatgagctcgtcgtgcgagccgcgttcgatgatacggccatggtcgagcaccatgatcacgtcggaattgcgcacggtggacaggcggtgagcgatcacgaacacggtgcgacccttcatgaggttgtccataccggcctgcaccacttcctcggtacgggtgtcgatggacgaagttgcctcatcgaggatcatggccggaggatcggctacggcggcgcgtgcgatggagatcagctgacgctggccttgcgacagaccggaaccatcgccttcaagcacggtctggtagccgttgggcagcatacggataaagccgtcagcgttcgtaagcttcgcggcagcaatgcactcctcgtcggtggcgtcgaggcgaccgtagcggatgttgtccatcaccgtgccggtgaacaggttcacgtcctgcagcaccacgcccagagaacggcgcaaatccggcttgcgaatgcctttgacggaaatgccgtcgtacaggatcatgccgtcttgaatgtcatagaaacggttgatcaggttagtcaccgtggtcttgccggcacccgtggcaccaaccaatgcgatcttctggccgggcttggcgaaccaggtgatgtcgtgcaacaccggcttgtcagggttatagccgaagttcacgtcggtgaagcgcacatcgccctgcaggagggtgagtcgtccgtccggcgaagtgatggcggtttcacgggccttcatggccacttcggcggcacgtgggctcaaggattgcgcggccttgagcgaacgggtaccatcatcgccctcctcgcgcttccatgcccagtggccggtttcgtggtcgacttcggtcatggtgcgaccgtcttcgccgagttccacattcaccaaggtcacggaaccgccgtcgtcttccggctgttcgtccatgagcgcgaaaatgcgggaagcaccggcgagcgccatcatcaccatgttgaactgcatggacacttggccaagcgggttcacgaaagagcgggacagcgtcaacagcgagatcagcgtacccaaggtgagcggaccagtaccggacaatccgaagttgcccagtccagaaatcgctgcaaatccgccgaaaatcgccagcagaatgtacagcaggtagcccatgttgcctacgatcggcatggtcacattgccccacgtgttcgcttcggcggaagcttcgaaaagttcttcgttcttcttgtcgaaagtggtttgggtggcgtcttcgtggttgaagaccttgatgaccttctggccgttgaccgcttcttccacgaatgcgttcacatcgccgatggcgatctgctgcttgacgaagtagcgtccggagcgggaaacaaccttgcgtaccaccacaaacaggatcacggtgaaggcgagcacgaaaatggtgacgggcaccgacagccacagcatggagacgagcgccgcgagcgcagacaccgcagacgagaacatttgcgggaacgactggctaatggcctgacgcaatgtgtcggtgtcgttggtgtaacggctcataatgtcgccgtgttcgttggtgtcgaagtagcggatcggcagggtctgctgatgggcgaacatgtcgtcgcgaatcttcttcaacgtgccctgttccacagtgacgataacccactgccacagccagctgcagaaaataccagccacatacaggcatgccataagcgtcaacgcacgcagcaacggcatccaatcaggattggtggcaccaaccatcggcagaatgtacgtatcgaccagcgactgcaggaacagtgacgatccggcctgggccgcggcaccgacgagaatgcacaccaccacaagtgccacacgccacttgtattggaaaatgtagccgaagatacgcttggtggtgccaggcgcggctttctgcatcggcggcttgccgtgcgattgctgcatgccggccgcgttgttgttgtctttggatttcaatgcggaagtttgttcagtcatttttgccctcctctcactgcagctcctcaggctgagcctgattcttggtttgcgattcgtaaatggagcgatattcgtcgcaggtttccaacagttcatcatgtgtgccggctgccatgatgcgaccgtggtccatgacgagaatcatgtcggattcctgcacggaagccattcgctgggcgatgatgatcttcgtggtgtcgggaatctcatgatggaatgcggcacgaatcagctgatcggttttggtatcgacagctgacgtggaatcgtcgagaatcaggatcttcggctttttcagcaacgcacgcgcaatgcacagacgctggcgttgaccaccggaaacgttggtaccaccctgttcgatgtacgtatcgtacttgtcggggaattcctgaatgaatccgtctgcctgcgcaagctgacacgcgtgacgaatctcttcatcagtggcgttcggattgccccagcgtaggttttcggcgatagttccggagaagagaacgttcttctgcaacaccatggcaacctgatcacgcaatacttccagatcgtaatcgcgcacatccacgccgccgactttcagcgaaccttcggtcacgtcgtacaagcgtggcacaagctgcaccaggctggactttgcagaaccggtgccgccgacgatgccgacggtcataccggaacgaatcttcaagtcaatatcgtcaagcaccggcttttcggaagtggtggaataacggaaggtgacatggtcgaaatcaatctcaccattcttcacttccttgacgggattagccggattcgtaaccgtgctttcctcgttcagcacctggcagatgcgttcggcggaggcctgcgaaataatgcacatcacgaaaatcatggacagcatcatcatggccatgagaatctgcatggcgtaggtgaccaatgcggtcagatcgccggtggtcaatccaagggccgcattgttgccggatgccacgatctgctgggcacccatccaggcgataagcagcatggacacgtacacgcacagcatcatgagcggattgttgaagctcataatgcgttcggccttggtgaagtccttgaagatgcgctcggaaatgcggttgaacttttcggtttcgtggttttcgcgattgtaagacttgaccacgcggatgccctgcaggttctcgtctaccacgttgttgagcttgtcgtacgtgtggaacacgcgctcgaacaccggatgcaccagtactgccagaccgcacaggccgatggcgagcaccggaatgcaggcgaggaacaccagcgaaatggatgggctgatgcggaaggagaaaatccacgccacaatcaccataatcggagcgcgcacacccatgcggatgatcattgaatatgcgttctgcaggttggtcacatcagtggtcagtcgtgtgatgatcgaaccggtggagaaacggtcgatattggtgaagctgtagccctgcaccttttcaaactggtcgtgacgcaggtttttggcgaatcctgcgcccgcaatggccgagaactttccagccaaaaagccggatgtcagcgaaaccgccgaacaaaccagcagaatcaagccgaatttcaaaatcgccggcatgctgccaccgctgatgccctcatcaatcagcgatgccatgacggtcggaataaggatttccagcacgctttccacggttacgaataccggggagagcaggctggcttttttgtattcgcgcagcgatttgcccagtgtgcgaatgacgtgttgctttggttttgacgttgtggacgtcgttgcgtttgccgctgtcactccttgtcctttctttttcatacttacttgcttgcgtgtgttacctgcggttgtttgcgatcgccatttcctgcgacattcgcagtatgcgcgaaacgtattcatcatgagaatcgcgattatgcggattccgtccatcgcatgattcttgcgattcttgcgaaacctgcggcttttgcgaaacctgcgattcgccaaaatcctgttcctgtatttccaagcttgaatatcggctttcgtctccgatcaaacctgttttcaccaaattcgtctgcatgacgtcaagcacgtgcatgaattggcggatctgatcgtcttcaagaccttccagcagaattcgttccatgtttttcgcattgtcgcgcaagacttcggcgatatgcctcgatttattcgtcaacacgatttttttcagtcgtgcgtcgcgtttcaccggttcgcgcgcgatcaggcccttctgctccatcagccccagcacccggcatgatgtggatcgagtcacgccgaagcgttgctcgatgtcttgaggaaagatttcctcgttgtcatgccgtgctagatacacaatgatgtcaacgttgccactactgatgtcttccgccgcttcagggcgggtgacgcgcagataccggttgaccacgttgtgcagcgagcgaatggccacgctggggggctttgccaagccgctttcccagacttcgacgagtcgtgagccagtcggttccttgtattgttcgttcgtcacttctgtcacagcatacatggtaaaccgttgtatatacaactgttgcacatgcaacaatcagcgtgtcgcgcatctcatcgtccgcgacaaaaaaggccgaggaatcagatccgcaccggttcagagttaacggatcgaatccctcgaccttaagccttgaatcctacgaaactacttggtgagttcagcgtacttctcaagcatgtattcgaaaatctgcttgccatcggcacccatcagcaccgacatgctgttgatcggcatggagtcgaggaacaggcgggtcatgtcgttgtcgggcaccaccggcatacggccggcttcgccctcggcacgcaggatttcaagcaccttggaaccgagcggatccttgcgccattcggagaagttggaccattcggtgagcggctgggccttgccgtcgccatcaagctccaccactgcggaaccggcgatgtcacggctggacgtgccgacctcgatggtgtattcgccgctctcgacatgccaatcgttgaacctctcggaccagtaggcgaaggctcgatcgtcaaggtcgagggagatctcagcggattcaccggccttgaggaacaccttcttgaagcccttaagctcgtgcttcggtcgggctacgtcggccttgcccggagccacgtacacctgcacggtttcggcggcgtcaacatccgaggcgttcttgaccacggcggtgacggaggcggtgcaggcgccggtcttgacggccttcacgtcgctcacttcgaacgtagcgtagctcaagccgaagccgaacgggtagtcgacggccttgttgtaggtgtcgtagtagcggtagcccacgaacacgccttcgccgtagtcgacatggctctcttcgcccggccagttgatggtgctcgggtcgtcgttgatgtcgaacggaatggtctgcgcaagcttgcctgacgggctcaccttgccgaacagcacgtcggcgagcgccggaccgccggactggccgagcagccaggattcgagaatgcccttggcgttcttggcccacggtgccacggtgacgacggaaccgttagagagtacgaccacaacgttcttgttttcggctgcgacggcttcgagcagtgcgatctgcttggccggcatgtcgagggtctcacggtcgaagccttcggattcggctgcttcggggagccccaggaacatgagcaccacgtcggcgcccttggccgcttcgacggcctcggcttcaagtgccggatcggccggttcgaggtcgagggtgaaacctggagcgaacttggcatccacgccgcgttcggcgagggtgtcaaggaagctggtcatcttggttggggtgatgtgcgaggagccgccgccctgataacgcggggtgcgtgcgaattcgccgatgaccgtgaccttggcatcgccggcgaccggaaggatggcatcatcgttcttgagcagcaccatggattcgatggccgcctgatgtgcgacttcgtcgtgcgcttcgatgtcgaaacgatagttttcgatgctcatggctgcgcgcgtcttgttgaccaagtcgatcatgccttgtgccatacggtcgagctgtgccggctgaatgcggccgtctcgtgccgcatacacgatttggtcgtcggtgtagcttggcggcatttcgaggttgaggcccgcgttgagggatgcgacgcgatcatggtcggcaccccagtcgctcatgacgatgccttggaagccccattcgtcgcgcaacacatcggtaagcagccagtggtcctgcgccgcatgcacgccgttgatgcagttgtatgcgcacatgatggtccacggctgggcttccttgacgatgtgctcgaacgccgggaagtagatttcgcgcaatgcacgctgggagatgttggcgctgatgcgcagacggtcggtttcctgattgttggcggcgaaatgcttgagcgaagtgcccacgcccttggattgcacgccggcgacgatgccgatggcttcatgacccgccagatacggatcttcagaccagtattcgaagcagcggcctccgagcgggttgcgcttgatgttcacgcccgggccgaggattacggcgaccttctcctgaatgcactcttcggccatggcttcgccaacctggtggatgagttccggattccaggagctggacagaccagccgccggcgggaagcaggtggcaggcacgcagttgttcaggtcgacttcgccggtggtggccgaattggacttgcgcaggccgtgggggccgtcggtgatcatgtagccgggaatgcccttggcttcaacgccctgcagatgccaggcgtcgccgccggaagtcagggatgccttctcttcaagcgtcaggtcattgacggaaggataggtgctttcgctcatacgttcctctttcgcatcgttttcttgagttcgtatcggttaaccgatctgcatgggacctcaaccccgaaatctctactaaccggttggtaggtactttatcaaaaccaacaccgcaacacgccaatcttccttgaaaaatcaattaaccaaccgtaaagtaactgcagtactcataacatacgagaagtggcattaccacgcactatgcgtgcgtagatcgtcattatgaagggcaaaaggggaattaacatggccaacgaagaagtcgaccggaaagcggagatcctcaacgcggccgtcgagctgtttgggacgctcggctattacggcacttccctgcagaaaatcgccgatcgcgtaggactcaccaaagccggagtactgcactacgtcggcagcaaggagggtctgctttcttgcgcattggacgaagtctacgattccgaaaccgaagacattctgacaaacatggtacgcgagccgcgcccgctgatcgcggatatgtggcgcaggatcgtagcggtgaacgcacgtagaccgcttcaggtgcacatgttttccacgttgagtgccgaagcgatcgacccgaaccacccggcacacgagtatttcgccaatcgagagctgcataatgccgacaccgcgctcaacattcgttggcgtgtgcccgaaggtgttgatacgcgccggctgctcaatgcgggattcgccatgatggacggcgtgcagctgcgctggctgcgcacgcccggtcaggacctgaacgccatgtgggcggaatgcgaagacgccctgttccccctgcccatgtgggaaggctaccgctgaccccctatcatgaaacgcacacttgtccactcatacaagtccagattcctccagtcactggagaaatcaccccaccagaagcccctccaacaggcaaaaacctccagccactggaacaatcgccccgccaagaatgtcgtcaacatcccaaaacctccagtgactggaagaatccagactccaaaacccaccctaactgaccagtttcttccattcactggaagaaacaccccgcttagaacctcaccagcatcccaaaacctccagtcaccggaagaaatggtcacgtctggaggcagctgttgtagcctaaacctgggaagacgtaaaggaggcatgtatgcgggttttgctggcaccggattcgttcaaggaggccgcttcggccgaggtgattgcgcaggcgatggctcgtggcattatgcgcggcgacccgcaggcagagtgccggcttttgccgctttccgatggtggcgaaggattgacgcactccttggttcatgccaccggcggcacgttgcatgatgttgagacggttgatgcggtcggtcgcccgattattgcgcagttcgggtttcttggcaataagcacacttcccgtaccgccgtggtcgagttggcttcggcaagcggacttgagcaggtctcccctgccgaccgtgatccgatggctgcatccacattcggcacaggcttgctgattcacgctgcgatcgacgccggcgcggatcgcattgtgctcggcttgggaggtagcgccaccacggatggcggcacgggattggctcacgcatttggatttcgttttctcgatgcgcatgattgcgacattccgcttggtggcggcgctcttgttgatttggcaaggattgacgattcaagagtttccgattccatcaaaaacgttccgattgttctcgcttgcgacgtcaccaatcctttgaccggcccggaaggtgccgcccatgtgttcgccccgcaaaaaggcgcgaccgcaacacaggtcgagcttctcgatcaagggcttgcgaatctcgcacgcgcaatcatgcaatataacggccgcgatatagagcacactccgggagcgggcgccgcgggcggtaccggcggcggtatgctcggcctgttcaacgcatcgattcgaccgggaatcgaacttgttctagatcttgcgcatggtcgcgaagcatgcgcatgggccgatgttgtcattaccggagaaggctccatcgacagtcagacaccgtacggcaaagtgccgagtggcattgcgaaattggcgcaatcgcaaggaaaaccaaccattgccatcggcggaacggtaacccgcgattcgcacaccatcgaagcgctgaacgaggccggcattgtcgcgacgttcggtattgcgcccgggccggcggatcttgcgacgctgatcgccggcacggaacgcaatgtagaaatcacctgtgccgcaatcgccagcacactgcgcgttgcttctgctactgcagtaaccgcagctacttcaccttgcgaatcagcatgatgaacaccgcgcccagcagcaccgcaaccacagcgatgacccattcatgcgagccgcctacgatcagcatttcgtaggcggctcatatcagattagcgtgtcgattattgggttctgcgacacggttcatttcgtttgcttacgcgacggtgaaggtggtgcgcttcaagtgttcgcggcggctggaatggccgataagcacttcgaattcgcccggctcaacgattcggttagcttcagaatcgacgatggtgcaattggaaaccggaatatcgaaggcaacggtcttgctttcgcccggttctagttccactcgctggaatgctttgagttcacgatccgtccagctgtaggaggtcacgatgtcgccgatgtagagctgcactacttccgtgcccttgcgatcgcccgtattggtgagggtgatttcggcatgcacggtgtcggtttcgccgaatgcgccggattccggaacgttggtgaccgtcggttcgccgtattcgaacgtggtgtagctcagaccttcgccgaatgcgaatgccggatcctgtgtgaggtcggcgtagcggttgccgtgctggccgcgaatctggttgtagtagaccggcagctgacctgcatggcgtgggaaggtgatcggcaggcgtccgctcggctcggtttcgccgaggatgatttcggcgatggcctggccgcccttcatgcccgggcttggagcccacagcagagccgaagtgccttcggccggtgtttcgtcaacaatcacaccgttggtaccgatcacggatgccggcagtacctgcggcttggagctgacgagtaccaccacgaacggcttgccggtttcgcgagccacgttcgacagcgcgtcgattagtgcattctggccgccgagcagttcaagcgtagcggtggagcagccttcgccaatggtttgaatcacatcgcccaccacggccacaatcaggtcgctttggcgtgcgttttccacggcttcatcgagcagtacgcggtcgagcttggcggaaacgccgatcttcgggcgaggctggccatccgggtagaactcgccttccggatcaggcaccaaatccacgatattggcaccgcgggagtacacgacctcgcagccttccggagagagctgcttgaagccatcaagcacggtggtgatcatctcgcgcgggtggccgtcaggcatccagttgatctgaccggagctgcccgcccagtcgcccagctgagtttgcgcatcgtcggcaagcggaccaacgaccgcgatacgcttcgcgccagccgcattgaacggcagcgaaccattgttcttcagcaatgccacggcttcgcgagccacttcgagattgagctgctggtgttcttcggagccgatcaccgcattgatgcgttcctgatcaggcagacgcggatcttcgaacagtccaagacggaactttagtgcgagaatacgagccacggcggcatcgatcaacgattcgtcaagcagaccggtcttcacggcttcgatcgcaccctcgtagaacttcggggtggtcatcaccaagtcgttgccggacttgaccgcgtcagcggcggcctgcacatagtcaggcttgaccttctgctcccatacggaacgtccgacgttgtcccagtcggtgataagcgtgccctgatagttccaagcgccacgcagtttgtcggaaagcagccacttgttgaaggtgaccggcacgccttcgatggattcgtagccgagcatgaaggtgccacagccttccttggccacgcgttcgaacggcggaaggaaccaggattccagcttgcggtggctcagatcggcttcggaagcgtcacggcctccttgggtttcggaatagcctgcgaaatgcttggcgcatgcgaggatcgcgtctttggcaagcggctcgcccgccttggctccaccttgatagcctctgacgatggacgatgccatttcgccaattaggtacggatcttcgccaaaggtttcgcccacgcgaccccaacgggtgtctcgcgcgatgcacagcaccggagagaacgtccaatgcacgccggtagtcgacacttcctcggcggtggcacggcccgcggcctgcactttttcggaatcccacgtggtcgccatgcccaattgttccgggaaaatggtggctcccggccagaaggaatagccatgaatgcagtcgtcaccgatcaccagcggaatgccgagacgggttttggtgttcaccgtttccacggctttcggcaggtcagacggcgaggtgtgcagaatggagccgacatgcttgttgacgattagatcgtccaagtcgccgcttcgtgcgtcaagttgcatcatctgtccgactttttcttcgagggtcatacggccaagcagatcggcgatgcgttcctcggtcggaagttccggattcttatacggcagattcgcagtgttttcaatggtttcggtcatgggattgctcactttcctcattgaagcgatttcctttaattaccaattggtagtttaacacgatgcaggcacgcacgcaactcgacatgaccataccaacacagaaggcgagaagcccgtcagacccctcgccttctcacacgaatacatgcaatacaatcttaaataatcagcgatatgcatcccataatggagcgggaaacagcatgttttccatctgagcccactctttgcacaaatcaacttcaggttcgcgcaaccaccataattgcacgccatccatgatttccatggccttacgcaccaccggacgcatactcgactcccacgaacccaattgcggaggaatcagccaaggatattgcgaataatgctcccaaatatcgtccatacgggcagtgaattcatcatgcaacggatgatcaggattcaacgactccgcagaaagcacggtaaacaactgcaccatcatgcgacgacgcgaattatgccgcaccaaataacgcaaatacgcaggaaacagcggcgcagtaggatcactgccaggcatacctgatgcaaagaaatcctcaggagtgcccgtctcaccgtaatactcgttgaacaccatggccagcatattgtctttattacccacataccgaagcacaccctgcttggagatgccaacacgatcagccacatcctgaatggaaataccgttgaacccacgctcgctgatcagctgcaccgcggcatccagcacttcctcacgccgctcctgcggtgattttcggatacgtttcggagtctcttcctctgccatgattccgagtctaatgcaccttgtgtcgattgccgttgattgactgactatggcatgtcatcgtgagaggtatccgcccgaatccatccatgacgccatacgcgagtcagatcccacgcctcaagattgccgccgttgcgaggatcccgcggcggtttcccttcgccactacccggtttcgcggagcgcgcaagctggtagctccaatagatctgtcccgccgacacgtcccatgccgcgcgttgcaatcgtgacacttggcggtatgcagccgatcggttttggctgtgtagggcccactgattctccacgcaccactcgcccaccagcacgggaatacgacgagccgccgaacgaatggcgataccactcgcgcccaccagcatccggtacagccatggcagtcgccgcgatcgcaggtacagccggcgtgccggtcccgaaaacaacggatcctccatcgcgatgagatactgatgggtgtcgagcatgacgttgcgcatgccagcacgacgaaaccaaccgccccagcggagtagtcggaaaccgtcatggaatacgatcacggtttccggacgcagcacggcgcgcaaccgggcgtaagcgtcgcggtagaagcgcttcagaaaccgcagtgagacatacgtgctaccggaagcctcatgagagtctttcgccgtgttcgacgtgctatggaacaccgaccagctcactggttcgttgagtacttcgatgctgtgcagggccggttcgtcgcggtatcggcgagccaatcgctccagcacgttcagcgtgtactccaccaagtccgtattctgcgcccatttgcacacacccgtcagaccgccgttgtcgaaaccattctgcgattcgggaacggtatgcaggtcaatcataatcttcaatcccgtctcccgcgcccaacggaacgcgcggtcgaggtacgtgatgcagcccggatgcccgggccagtcgccgaagatgaaatacggtatgggaatgcgtacgaggttgattccgtgaccgacgataatacggaaatcctccagggtgatgtaggtttcgcggtgccggcgcagttcctcggcgagattccgttcggaccagagggatacgtgcgtgcggtgcatccagatttcatcgtcttcggcgctgcgggtgaacggtttcggatccatccatttctccagcaccagccagttgccgaggttcacgccgtcgattcgctcatcgatgcctagcaccatgcgtctcaccgcccttacgctcgggggttgcccgacttttcgtttccgtccatcacaacccatggcaaaacccattcggcccaatgggccaaggaaccgtgcgtcattcgcaacattccttagtccattgtatgtgccccgcgagcggccacacgtccgctcggaatcggatcacgaccggatcagggtcgttgaatgatcgtggtggccgcccgggcgggatcagtcgacaggcttcgtttcgtccgcctcataatcgaagaaatcaaaatcggcggtcttctcatgcaacgaagcatcagtgacggcaataccgaccatagtgccggtgaactcaccgaacttgcagtattcgtcagagaacgtggtggtatcgaaatccggaccgatcttggtccaattctcgccatcataaccccattcgaaccaagtgcgacggccctcaatgttcaaacggaagtaaatcggcttatcttccacggcaacacgagtgtcaagcatttccgtcttttcgccgttttcgagacgcacgatcgaaatcgcgctgccgccaagcgtctgcgaataatacttgcgcaggaaaatgttattcatgttgtcgtagtagatggtcaagccagcgctgtgctggtagacttccggctcgaactccatcttggtggtcaccgtggcatacacgctcgtcagcttgcgagcaagcaggctcgtacgattcagcgaggcaagcgattcttcaccgcgaacacgcagccagcccgggcgttccgtagcattcgcaaacgtgctcggcatctgacgcggcgagtaataccagttgcccaattcgccgccatcaaagtcatcaaagttcggaatctccggcatcggcacatccggcagattcggttcctcaacctcaatcttcgccagattggaaccgtcagccatacgcagccagccatcagacgtccactgcatcttctggatagcggtttcacggccaagcgtgcaacgcaattccggcacgaacggacggctcgtcaaatgcaccagataggtttcgccattcggcaggtcaacatacgagccatgcccggacttttgcagcacggaatccgggttgaaatagcgcggcttcagatgatcgtcatcggcacgctcgttcgactccttcggctgtgacgtaaccagcgggccattcggatccggctcgtacggaccccacacattgcgggaacgccccatggtcacggaatggttgtagccagtaccgccctcagcgcacataatgtaataccagccgtcacgcttggtcagatgcggagcctcaatgcagccacgatcagtagcaccacgccaaatacgcttcggatagccaaccacatgcttggtttccggatcatattccacgcagcagatcacacccggcttctcatagccttcgcgggtctcccactccaagctgacgatgtacttcttgccatcatcgtcatgcagaatggacgcatcgaaaccggaggaagtcaaatacaccggctcgctccacgggccttcaatattcttcgacttaataagataattattcacgtcgaaatagcgcgcattcatggaattcataacaccataaatcacgtagaacatgtcctcttcctcacaatacgtgaggcaaggagcccaaatgcccttagcgctcggcagcttggtaaggttcggattcgtgtcatcggtaagcacatgggtaagcagctcccaatgcttcatatccttcgaatggtagatcggaatgccagggaaccattcgaatgtggagacggcaacgtagtaatcgtcgcctttgcggcagatgactggatcaggattgaagcctttaacaataggattctgtagcattatttctcctttgatttctgcttttcttttcttacgtttttctcattgctgaacggggaaccagttttgcgctatgcagcggccgaggtcccaggcgtctcagccgatccagccaggggtgttgaccgtgtcggtgagcagcttgtagttccagtagtagaagccgctgccgttgctccatgcttcaagctgcgacttggcaacgccttggtagagcgcacgcttttcttcggcactgagcgtttccgcctgcgcaccttcctcgccgttgagcacgctctggccgccgtgggtgtccacaccacagccgaccgagttgaacaggcaccactcgcccacaatcaccgggaagtattcgctcatttcggcgaccatcggagcgtacgtgttgcgcacgaaatcgtcgtagccttccacagtctgcgggcaacccatcatttccgcggccatcaagtactggtgggtgtcgaggatcacgttttcgaactctgacgcaagcttgccatctgcgccacgcatgaagtccttccactgttcgatatcgaatccatcatggaataccacagccttatcagtcggcaaagcacccttgtcgacgtcgcgcaggcgacgatatgcggtgatgtagaagttcttgagccagtcgaattcaatcggaccggtgccttccgcaagttcggcatcgacggccttgtatcgttcggtcacgttcatcatcggccaggacgtggtggtgttcggctcgttgatgacttcaatgcccatcagcggttgttccatcgaacaatgccgggttcatccacttttccagaaccagccagttacccaggttcacgcccttgatgtaattgaggtccatatgcactcctccgtacgttttcgatcgcagtttctattacttagtaaccacttagttaaatgataatacatttttcttccttacgcaactcgactacacgaaaagcccctttcttgcgggaagaaagaggctttttacaaccagagagaaataattagctagcaaagcgtcacgcgaagggcattcaccgaagcggcgggcagtgccaccgtcagctcggtgccgccagcggattcacgcacggtcacagcagtatcaacatccgcagtatgggtgcgcacgagatccggatgccccacagtattgcaatcatgcggatcttcggaagcgagcgtttccatcgattcgactttggctccgcacggaagctgcaatcgtacttcagcagcctcgttcatgtgtgcattagtcagattgaccagcagctgagtgccgttttcattgcgtgacgcaaacgtatacacggcggaatcttcggaatcgttgcgattcacatcaagtgcgatcatgccacgatgcgccctgtacatcatgaatacgtcatagttaggcgtaaggatggtccggtcaccttcagtcaaaatcagcgagttgagcacgttgatggtttgcgcgttgcatgccatggtcaccttgtcgcagttgcgctgcagcagatccaacgtaagcgcggtagtgatggcgtcacgcatggtcacctgctgcttaagcgccgggcgcgcaaagaacgcggtcttatgccaattgccccactcaccgataatcagatcgacatgcgaaagcttggaatccatcgccacttccggctcatgaataagcgccaaaccatcgttcatcaaacgccactgatcacacagaatgtcttcaagctcaaggcaaccctcaatcaccgtgttccagccgtcttcatcgaactcggtcggagtatcagcatcgttatccacattccagttgtagaaatgcagatcataaccatcgattttcggctgacgatattcgacaagaccacggaagaagtcctgggtccactgcacgcgttcgcgcggcttgttaccgtcaggaccgctcgcgatggcatacatttccgtcggcgcgaacacatcggtggtgaagcttggcatagcggatgcgaacctgcggtattcgtcaaggtaggtttgcggcgtcatggtaccgcctccagcccacacttcgttgccaatgccccaatatttcacaccgtacggtgctttatggccgttggcctcacgttccttggccagatcggtgggctgctcacgattgcagtattccatccaatccttcatttcggccacagtaccggaaagcatgttgatattgatccacggttccgcgccgagcatttcgcacaaacgcaggaattcgtcggtgccgaagctgtgatcgtcgagttcgtacgtggcgaagttttcattaaaggtggttttacgttcgctttgcggccccacgccgtcacgccaatggtaggtgtctgcgtagcaaccgcccggccaacgaataaccggcggctgcaatgcacgcaaagcatccaatgtggccttgcggtagccatgctcgttttcaatcggggaatcctcccctacccacagaccttcatcaatgcattcgccaaggaattcaatgaattggccatgcagtttcggatcgatacgaccaatcgtactgttcgggtcaatgcagacaaccatggtttgctcctttgcagtagtactcacatctgcagtgttcgtaattcgtacagttcctgtagttattgtgccgcacaatatgtgcgaaatggccgaagatcccaggagagataatgaaaggatctccggccaagttatttcggaaaatgccgacgctacttcacctttttaatcatcagaatgaagacgcaggcgagcgccaccatcacgattgccgtcgggaacaccatggcataggagccggtggccaccacgatggcggaagtgacgatcgggccgaccatctgaccgagagtggttgcgatgttcagaatgcctagatccttaccagcctcttcttcgttcggcagcacgtcaacgttgagtgcctggtcaacagagccgtacatgccgtagccgaagccgccgatggcggagaagagaatcatacccagcgcattatgcatgagccacggcagagcataaccgatggcaagcagcacgcttgcagctacaaccggaatcttacggcggccgattttgtcggaaatcggacctgcggaaagcgcggaaatcagggagaccaccatcagcaccaagctcatggtggaaatggtggctgcggaatcttcaacgctttgaccgatataatcctgcagaatatacagctggtagttgaggatcatgtagtagctgaacagcagcagggaacgaccagcgaatgccagccagaagtcacgagcgcccttggtcggcggacggaagctcatgatgatgcccttgaaatcgaccttttccttaggcatgtccttgctggacttttccttcggccagaagatcacggcaagcacaccggaaagcgccatggccacaccagcgacgatgaagcccgggagctgcagggtgatgaactgcgcaccaacaatctggccgagtgcggaaccgaaaagcgtacctgcggagatgaatgcagacatggtgccgcgcatatcttccggaacacggtcggatagggatgcgatgaccggcgcgatcatcatgttcagaccgaccatggaaatgcagtagctgacaccgatgctcacaccgtccggcaaaatgccgatgaggaacagcgagataccagcgacaatgccgcccgatgcgatccacggcgtacgacggccgaagatcgagcgcgtacggtcagacatgttgccgaccacaaggttggaaatcagcgaggcgagtgccgtggccgaattaagcacaccaaagatggcgtctttgctgtcgggcgcgatatcggccaaacgctgcggaagcaacactgcagcaacgatctgcaatgccagcatccacgcgaatgagaacacgaagaacgctacgcagaaacgcgttttgtcaattttggaaagcgtgcgagtgctttccgcggactgtgcgccagtcatgcttatctccttatctttcttcttcgaaatcagccccacgtttttgccgaatcttcaacgatcgcacaagcaagagaggcgctgattgaagtcgatgtccatcggcttcgccagttatcttatatcttataagtataagataacaaatcggcgtgtcgaacaactacccacttgcaaacacatcaatcaattacataaccgcaatatcgaaaccacacgaaaacacacgtgggcagcggcaatagtattcttcaaagcagtatggaatcacaggaaaaaacatcagcaaacagcatcaagagccgtccaatcaaccaaagaaaacgactctccccaacacaacgacgcaaacaggtcgcacaagaagcggtaaccctgatcacgcaatacggatcatatggcttccccatgcaagccttggcggacgcggtcggaatgacactgccaggactcaaccattacgtcaaaaaccgcgaagaactgctctcattggtcatcgaaacgttctacgactccgaagaaagcaatgcacccacgacattgggcgcaaccatcaaccactgcgaccaatcagattcagcaaccaaagaatgtcgacatttgcccagcgcactgcacgaaaccgtatgtttcaacgccaaacgtcctgaactcgtcgcactattcatgcgcctcgcaatcgaagcatccgacccgcaacacccggcacacgagttctaccaaaacaggcacggatcaatcctaaccgacatgaccagcgtggactgggaactaccggaagaataccgagatccagaacgcctgcacgacctcatcgtcaccgcattcttcgccatggacggcgtgcaaatccagtcgctgaccaacccaaacgaatccatgatgcaactttgggaacgcgccgaacgcattctgttcccctcccccacctgggacggctaccgctaaacagagcgcgacaagcaaaaacactgcaaaacaagagcacagcaaacaaaaaaggcgtctgtctgcggcgaccagtaaccaatcaccacaggcaaacgccctgcaacacagcaccggcttgcgaaggtggcaggaagagaagggaaaacccaccacccggcattcaacaaaccgttaccacaaccaagccgacgcgttacgcacacattcgcatcagccaagcagctcctgttagtccagcacaaacgtgttgaacgaacgcggagcaagcgtcactttgataccgcgatcggcattgcaaggatcggcaaattcaaacggacgctcctcatcaagagcgttctgagccaccaccacaatggtgccatccggattacggaaagcaatagccatcgaattgaaatgacccgtagtaccaagcacatgcgcacccggcttaacaaaatgcgagaaatgacgcatcacataatattccggattacgacgaacctcatgcgtatccgcagtaatggtgaacagcgaattctgccaccatccccacgtggaatcctgatcgtcaagaatcatattccaatatgtgtaggcagtcgcaccattacgcagataatggttgatcaagtggaaaatatactccgcatattcccacgtattatcgcccataccgcattcggattcagactgaatcagctcgatttcaggccaggattcatgcgtacgcgcaatacagttctggccggcccactggtaagcgatgcccttgatgtacttgcgagcgccatcgtcgaacagaatattgtcgacaaaacggttgtaattattcagcttcatgccgtagccgccggtccacgccatatcttccggaccattcagcgtacccagccaaatatcggtgtcaagaccagcttcatcaaaagcaggtccaagataatcgcggatgaacaccttgagcgcttcggaatcccacaatgcactcgggaacttctgatcggcgaacacctcgttctgcacatgcagctgattcacggtaatgccatgctcggcataagcctgaatgtacttgacgaaatacttcgcatacgccttcagattctcaggagtctgcaccaaacgaccatagttataagccttcggacgcttcatccacgtcggcgggctccacggactggagaacagctgcatgttcggctgccattcctgcgcgcggtggatgtacgggatcagggtctgctcgtcgtgttcgacggagaaatgctccatcccgtagtcgccgtcgacctcgtcgtagctgtaccagtggtcggcgaaatcattggcgccgacgggggcgcggttgaaggtgaagttcatctcatccgggctgaacagttccttgatgatctgatcgcgttcttcctcggtgaccgtctgcagaggaagccagccaagctcgttgaagcagccgccgaagccgcgcaacgcctgatattcgttgccgtcaagctgcagatcggaagcggaagtggcatgggtggattcgatgtcggaggttcggtcggcaagcttgtcgtcttgcgtcgttgcaatccaggtggtcatgatgttccttggtatcgtcgttgataattcggatattcgttgatggttggcatggatgggagaggcggggcgattcggtcccgcggaggggagacggcctatggcacgaccgtctcccccggtttacagcagctgccttacttgaccttcttgatggccatgatgaagaagcagccgatgatggccaatgcgatggacgtcgggaacgcgaagttgtagccgaggttgaccacgatggcggacatgacgaccgggccgcacatctggccgagggtggtggccatgttcaggatgcccagatccttgccggcctcttccttgttcggcagcacgtccaccagcagcgcctggtcgacggcggagtagacggcgtagccgaggcctgcgatgccggcgaacaggtacatgcccaaggtggacggaatcagccacggcatggcgatgccgacggcgaagagcacggaagcgacgacgaccgggaccttgcggcggccgatgagatcggagaccgggccggagatgaaggagccaaccagggacatgaccatcatgatcatggacacgacggacacggtgacggcggattccttgacggactggccgatgtagttctggatgatgtacagctggtagacgttgatcatctggtaggccatgagcatgcagaagcggccggcgaaagccttgtagaagtcgtgggcgccagcgaacttcggcggacggaaggatacgaggacgtccttgaaggagccctcttccttcggcaggaagtcagcggactgttccttcggcaggatgatcacggcgacgatgccgccgaggaacatgagcacgcccgcgacagcgaagccggcagtcaggttttcgatgaagaacgcgccgatcatggtaccgatcggagcaccgatggtggagcctgcgccatagaaggcggacatggtgccacgaatgccagacggcacacggtcagacagcacggcgaccagcggggcgatcatgcagttgaggccgaacatgcaggcgcagtagaagatggtgagcagcaccgcgttgtgcgtggtgccggtcaggaacagggtgacgccaccaagcaccgcaccgaaaacgatccacggagtacgacgaccgaacctggagcgggaacgatcggagaagttgccgaacatcaggttggcaaccagggatgccactgcggtgaacgcattgacgatgccaacgagagcatccggatcggcgccttcgatggtcttgtaatgcatcggcagaagcacggcggagacgatgccgagacccgacatccacaacacgccgaacagcaggaagcccgcaccgaaacggatggtgttgaccttgctcagtggcttgccggtttcaggagacagctgcggatccttgtctgcagcggcgatgttggcgttataacgcaccaaacgctcctctttgcttgcgattgcttcactcatgaaactctctccttcgattcatgtttcagtagtgttttctgtgatattcctgttttccgatagggcttctccgcccaatcaactaactaccacttggtaactagctggttttcatcatagataccctttcgaaagaacgcaagtcagacgcgaatttttccaacggcagcgttttttcaaatagcaatccacaacgattcgccccatacggcaacttcagtttttattacttagtaactgcttagttaaagcatattacaatctcttgtatctgtcattttccggcgtgtcccaacgtttccaacacacttcctctcccccttcttgtaacttagtaagcacaagaaaggaaaacgcatgcgtcgccacatcgaaagcaaaaccaagaaacgaatgagcgcagaagaccgcaagaaagcgattctcgaaaccacggtctctttcatctcacaattcggattctggggatttaccattcgcgacgtggcacaagctcagaacatcaccgaagccggcctcctttactacttcaaatccaaagaacaactgcttgaggaaaccctcaaatacgccgatcggaccaatcagatcgccatcgccgagcatcttggcgtgcagggcgtgaccggcgaagtccttgacgacggcatcgcataccactgcgatctggggctgaaggccatttccacgggaaccgtggagaccaacgccgaccgtccggagatggtccatctctacaccttgctggaaagcgaggcgttaagcaaggaccatcccgtgcacgagtatttcgaacagcgcgaaatcaatctgctgaaggaatacgcgttcgcggccgagcgcgacggtgtcgccgatccggagcgcaccgcgctgcaggtcctgtccgcgatggagggtctgcagctgcgctggctcaacggatcgcatgacgtcgacttcgtcggggaatggaaggccatcatcgacctgctcatcccctgacccagtcgggccgacgcgccaccaccgctttgcggctcagccggcgatgacgaccacattccagcggccaatcgtcagcttgtcgcccacctcgaccttcgagccctctttcagggcgatcgccgcggtggcggattcatcgacggtgccgtcggtgcccaccaccaccggagcgaccaccacatcgcccgacaccgggctgtcgatggtgacctcgtcggcggagtagttgagcagatacgtcacctgctcgccgcgggcgttcgttccgcggcgcaccgtcacctgtccggcgagcgcggtgccggcatcggcgatgcccgcgtgttccacggcttcgcgcaggacggcgcggatggtgtcggcgtcgagcagggtggcgatccattcggcgtcgcccttgccgaagccatgtcgggtcaccgcggcgtaatccttccacgcgtagtggccgtagctggcgagcacgtcggtgccgtcgaatggggtgaccagttcgatgagcgcctgcgcgtcgcttgccggggttttggcgagcgttccggcgaattccacggatacgtggccgttcgggcgggtgaattggttgtaggtcatgccgaacacgtcggtgaggttgtgcggcgcgcggtcgtgccatacggtcacctcgtcgtcggttacgaaggagcgcatggtggagacgaggtgtccgccgttttcaacgaacgcacgcaggcgatccgtagtttcctgagatgcgcagtagagcgccggggtcacgatcatctcgtatttggcgagacgttcggccggagcatcggacggcacgaaatcgcattcgacgttgagctcgaacagcgcgtcgtagacattacgcaccacgtcgttgtatttgagggtgccgccgaatgggaagccggcttcgatgaggaaccagtcgagcgcggtcagcgattcgttgctgaccatgatggctactttgttgtgcttcttcaggtggacgagccgctcccccacttccggtttggcgatctcgcgaccgaatacgccggcttcgcggtacgtggggttcggttcgaggtcgtggctcagcaggcccttccaatatgtttcaaaggaattatggatggagtgccagtgccagtattccaccatgtcggcgccggaggcgaggtgggagtaggcctgcaggcgcagctggccggggaatggtacccagccgtgctggccttgggcctcggtttcgagcaccaggtagttctggccgttcttggtggagcgggtcatgtcgccgccgaaggcgatctccttgccggtcaggtcgtcttcggtcgggtggtagatgtccacgccggtgatgtccactgcggtcgcggccttgaagtggtcgacggccggctgtacaccgtaggagtatccgcgccattcgaaatcgaagttgtgggtgatgaactggtcgtcatgcgcgtattcgcgcacgatgtcggcctgccactgcaggaaggcgcgcacctgatcgcggcggaacttgtcgaattcgccgcccagggactcgttgatggtggcggtcacgtccgggaagtcctcccaggagtcgatgcggttggaccagtagtcgaggccgaagtggtggttgagctcgttcagatcgccgtggaacttctcgcgcagatacttgacgaacagacgctgcatgtcgttggacacggaatcgtagtacttggtttcattatcgacctggtagccgatcaccgccggatggtcggcaacgtgggagatcagcttgcggatcacgcgctcaccgtagaaacggtaggtggcgttgacgatgtccatgatctggcgggcgccgtacttgccttcgccgttcggggtgaccgcgagcacgctcggatcgatcttgacgagccagctcggcaccgcgtaggttggagtgccgacgatgacgtcgataccgacacgctgtgccgcgtcgagagcacgatccacataggtgaagtcgaacgcacccggctgcggttcgcaggtgctccatgtggattcggcaatacggataacgttcagtcccgcttccttcatcatcctcatgtcttcatcgacacggtcgatgcctttcatcatgagatattcgtcgtaatatgcggcaccgaaaagaatgtgatctgcctcgtaacgacccatggatcctccatcgtcttcattgacttgttactgattgctactgtttctgcgtctaaggctgttcttctgcgatatccctgggatatatccttggatgcatcctcggaactctcatatctaacaaccattagatataagaaatataaatcttctagattcacttgtcaagaaccgcaaaatttcatggcgtgtcttacctaacaaccattagatacagtgtttccccttgaccaaaaccaaccaatcaccgcacgccacacaaaatgctatcccagcaggcaaatccatccagccactggaggaaccctcccgcaaacatgcctccaaaagtccagatccatccagccactggaggaatcaccccgcccaaaaccttccaaaagtcctgattcttccagcgagtggaagaattgggacgcgaaaggctatagaaacacagcccgcaagagagttgcacacggcttagcggtagctgtcccagacaggtgaggggaagatcatcttttcgaaggcgagccattcatcgtagaaatcgatgggcggcttacgcgtccaacgcagttgaatgccgtccatcgcttccaagctttgacgcacaatcgcacgcatattctcccaatcaccgatttcaggcggcaatttccatgtgtactgggaatagtgttcccacacgtatttcggacgattctcgaaatagtcgtgcaacggatggccctcgctgaaagattcggtttccagcaccatgtatagctgcagcaagctacgtcgactctcattgtaacgtaccaaaaaacgcaggtatgcgggaaacaacatgccttccggatcgctgcccggcaatccggattttgcaaaatcagccggagtgccttcctgatcataattgtcggtgactagaagcgacaacaaccgttccttattgccgatgtaatgcagcagtccaggctggctcatgccgatcgcatcagcaatgtctttcaatgacgttccgtaatatcccttttccccgataagacggctcgccgcagtgatgatttccttcttacgttcctcaggtgatttacgaacacgtttcttcccctcattacccataaggaacagtgtactatctaccgttcattagacaggcaaaatcgtatcggaccgttgcatttccactcgccacacaaaaacgagccgatcttcaacagaccagctcgaaattacattcaaaaccacttcgagatcacattcagtcagcctcgaccaaccaaaaatattcgaaaagcagttttacttctggaacacgtcagggtgtttcggatcacccggttcgtcggcgaggacgccctcgagcccgaggaactcctgccagaattccagcgaattgccgtacggagctgcctgatggccgcgcgcctgcaggttcgccttcgcctcgaacacatcctcctcgcggatgccatcgaaatacgattcgagacgctcacggttcgtcggatcatagaacagcgatccgatgatttccgtcaaccgttccgcacgcgccacaggcagcgaatcccagtgacggaattcaatgaagttcttcagacggacatcgttgaaatgcgtggaaatcacatgattgatttcgtatgcgttgagttctcgatcgggatacacgtcgttcgcattctcatagaatgcaggatgatgcagatcagttccgggagtttccaacgcttccggagtgtgcgtcagatcagcgaacatcatcggcgtgctcaacacgtcgaccgcataatcttcccaaccgaagcgaggatcaaacaatcccggaataacgttcgtgcgctgcaaatccaaataatcccacatgcgttggcgcagcagcggatacggattctcctgtccctcgaaatacggggtgttacggaagaaccatgcgagaatcgggccgaccaccgtacccaaacgcagtttggaaatcgcgtcctgttcggaaacatagtcgatgctgatctgcgtcgaagcggagcagcgcatcatgcacggaccgaactggccgacgcgccccaaatacgcggtcatcgccttgtaacggtctttcggattgacgggaatgtcggcatagccggacttcggctggtatccgtaattaaccaagcggaagccgagatcgtcaagcacgggatcgacttcgcggcggaacgctccgtaaatcgtgcacagatcttccgacttgtgcagtatacccagcgagcattccagctgaccgcccggctcaagcgacacggaaataccttcgcggccaagaccaacaagcctgccgttctcccagtattccttgctttcgtcgtaatacgggcgaatgcggttcagcaacgcctcgatgccgttctcctcgtaatagttcacggcggtatcatcgctgttatgcaccggcagatgctcgatttccacgccgaaaccgccggttccgcgctcttggcagcctgattcgaagaatttgaccagactttccacatgcttcggattcggctcggtaagcaggtgtgcgtaagaaattcgtggtgctgtcatgttggcaatcctaccgaaactcgttgatgagcacggcgcgattgctatacgaaaaactgatagccaactcttgcgtatcccgaatcgagtacacattttcggttaaaacagacatgctctgcaaagccgaccaataataattaacagctattaataaagtcagaagcaattaccgttatttgaagaattgtttgtataaatcaataaaaataccgacgctgaagatgctgtccgcgtcggtattttggtcaattccagtcagtgcttattgatttatctgcctatgatcaggcgcttttttgctttgcgtcgtctcaccctgttgcgcggccttgtgagccttcttggcggctgcgatcatcagtttgatgcggttgagctggttcgcttcggatgctcccggatcgtaatcgatggacacgatgttggcttccggatgcagtcggcggatcttgccgaacatgcctcggccggtcacgtggttcggcaggcaggcgaacggctgcgcacaaatcacgttcggacagccggattcgatgagctcaaggatttccgcagtcagcagccagccttcaccagcctgcacacccacggaagtgacctcgtcggccttcttcacgagttccggcatcggcaggtcctgggagaacttgccgtgtgctaaatcgatcgccttgtgcacaggagcgttgtacatgtcaagcgccttgcgcatcagcgcgtagccaagcttgttgccgcccatgccgaggtaatgctcgttccagtcggaaatgtatgggcgggtggtcatgaattccatgatgcccggcaccacagcctcgcaattctgcgattcaataacgtcgaccacatggttgttggcgtccggctggtacttgacgaggatttcgcccaccacaccgacgcgcaccttgcgcggctcgtccttcaacggcagcgcgtcgaaggatttcacaatctccttaacgagcgtctgatacggcagataccccttgccgatgaacttgcgtgccgtcttggaatggccgtggtgttcgagcgtttcacgcacgatggtgtcccacgtgtggtacagctgattcgcactgcctggcgtcacctcgtacgggcgtacgcgatacaggcatttcatcagcagatcaccgataatcagcgccttgatgacacgatgcaacaatgccggagtggcggtgaagcccggattgtcttcgatgccctgcgtggaaatggcgatcactggaatctgcggatagccagcatcgaccaatgccttgcggatcaggccgaaatagtttgtggctcggcacatgccgccggtctgtgtgatggcgagcgcggtgtgttccggatcgtatttgccgtccaaaatcgcgtccacgagctggccgataaccatgatggccgggtagcaggcgtcgttgttgacgtatttgaggccggtttccacgttttcgcggctggcgtgttcgagaatgtcgaacttgtaaccgccggaacggatcacggattccactagggagaagtggatcgggctcatctgcggagccacgatggtgtagtccttcatgtctttgccgaatggcacgcggttggcgtatttcgacatggtggcggaattgtgtgcggacttcttcgcttcgccgatgccgttttccgcggcacgcttggatgcggctttgacggcttcggtgagtttcggattggctttcatcacggtgtcaagcatgacttgacgtcccggagtcggcgcctcagacccggtcttgcggaattcgccctgcttgttaggcgcactgtcttgtttgttaggcatgactgcggcgattccgcgctgcttgttgcgttcgcgttcttcgacggctgccttgagcgagcgcagtcggatttttgccgctcccaagttggagacttcgtcgatcttcagcatggtgtacacgtcggccttgtcggcgaggatttcgcccacctggtcggtggtgatggcgtcgagaccgcagccgaaggagttgagctgtacgagttcaagtcccggataggaggccacgaagtttgccgccgagtacaggcgtgcgtggtaggcccactgattggtgactcgcaacggcattttggtgaccttgcggtcttccacatgacggaagccgtccgcgttcttcttgcgcggatcgtcttcgtccgcggcgaggaaatcactcaggttgagcttctcccccggctgcagttcgcagatcgaatcttcagacaataccaccatgccgagcgagcagatggtttccggaatgccatggttgacttccgggtcgatgtggtacgggcggcctgcgagcacgatgcctcggcagtcgtgttccttcatgtaggcgagtgccttgaggccttccatctgcacatcgtgcttgaagacttcgttttcggcataggccgctttgactgcggtttcggcttcttcacgggtcacgttggcccaagcgaattcttcgacgatacggtcgaccatgagttcatggttggccatgttgaagtatgggcgcatgtaacggatgccctcttcgcgcagttccggcatgtttgcgccgatgaccacgggatagttggctactaccgggcagttgtagtggttgtcggtgttgggtaccaggttctcttcgtagctgacgcacggatagaagatggttttcacacccttgctcagcagccatttgatgtgtccgtgcacaagtttggccggatagcagatgttttcggatgcgatggattcgatgcctgtttcgaacaattcgtgcgagcttcgtccggaaatcatcactttgaagcccagcgaggtgagcagtgtgaaccagaacggatagttttcgtacatgttgagtacgcgcggaatgccgatttcgccgcgggttgcgtttttgtcggtgagtctgcggtaggcgaagcaacgcttgtacttgtagtcgtagaggttcgggcgatcggaacgcttctttttcgcgtctccgcctcgttcgcagcggttgccggtcacgtagcgggatccgtcttggaaggtggtgatggtgagcttgcagtggttttggcacagtttgcacacgtctcgttcggaggtcatcgacaggttgtcgagttcttcgccgctcaaaatgttcgatgcggtatggcatacgcctgcgatcaccgcttctttggtgtcggtggtatcggcgtcttcgtcttccgcttcgtcggcatagtgcatgcgtgcggtcagtgcggcaccgtatgcgcccatgagtcctgcgatgttcggtcgggtcacttcgcgttcggtaagcagttcgaatgcgcgaagcacggcgtcgttgaggaacgtgccgccctgcactaccacggtgtcgccaagttcgccggaatcacgcagtttgatcaccttgtagagggcgttgcgcactacggaatagcacaggcctgcggcgatgtcttcgatggatgcgccttctttctgcgcctgcttcacggacgagttcatgaacacggtgcatcgggagcccaaatcgaccggatgggtggagttgagcgccgcttgggtgaattcctgaatggtcagtcccatggaaatggcgaatgtttgcaggaatgatccgcagccggacgagcatgcttcgttcactgcgatggagtcgatcacgccatcgttgatggcgagatatttcatgtcttgaccgccaatatcgatgacggcggtgacgcccgggcttaccatttcggcaccgcgatagtgagccatggtttccactacgccttcgtcaagatgcaggccggtggtgatgaggccttcgccatagccggtcgcgcaggatcgtgcgatccatgcgccttcggggagttcggcttggatttttttgacgatttgcacggctgccgtcagcgggctgccttcgttggtcgcgtaagaggaccatacgatttcgcgatcgtcgttcaccaatgtcgctttgatggtggtggaaccggcgtcgatgcccaggaagtgcggtccttgggctccttcgagcgtgccttgatggacgtgctcgcgatgatgtcgttcgttgaatgcggtgcgatccgattcggtagcgaacagcggaggcatggtcggggtgttggacggcaggttttccagttcgtccagtcgcgccagaaggtcggcacaggttcgtgcttcgtaatgcttagtcaaggtcgtcaccatcctgatcggcctgcaatgcggcaccgtatgccacgtacaggtgagcatcggtcggaacaatgaattcgtccactttgccgtcgagcgcccgcttgaacgcggctcgcagctcggacatgaagaacaacggaccacctaggaagatcacggttccgtgaatcgggcgcccggaggcaaggcctgcgatggtttgcgtggccactgcggtgaagatggaggcggccagatccggtttggccgcgccatcgttgatgagcggctgcaaatcggttttggcgaacacgccgcaacgtgatgcgatcggatacagggtttcgtattgcgcggccatttcgttcagaccagcggcgtcggtgtcgagcagtgttgccatctggtcgatgaatgcgccggtaccgcctgcgcaggaaccgttcatgcgctgttccggagtcggcttgagataggtgatttttgcatcttcaccaccaagctcgatgatcacgtcagcctgcggatattccttatcgatggcttcggtttcggcgatgacctcctgaacgaagggcacgtcgaggctgtctgcaagagcaagaccgcctgaaccggtaatggcaaggcgaatcggctcgtcgcctcggccaagcttttccaattctttgtggatgtcggccagcagtccggccacagtggcgcgcacattcgcgtggtgacgccgataatcggagaacagcgcgtccgcgagcgcgtcggactgatcgagcaccaccgccttcacagtagtggaaccgatatcaagacctacacgcaacggctttatgccgtgcgtttcggtcccggcttctgctgcttcaaccatgtatcaacctctatcgttctatccgccgggctgcattccatggcagacatggaagcccctaccccgggttatccaatcatgtaatcgtagtctgtgcccacgcctaagcgcttcgtgaatgctcacaatcagcataaaagggacgaaacagcgcataaactagacaaccaatccagtcaatgtgcctaattatgcatccggacactcgacgaacgccgaaatcgcaaacccagccaaacatttccatgtcaggatgcgccgccttcccccgcggaacggtctttgccgtatatttcgggaatgaatcgtgtttggtcgtgcagtttcgaccagatcacaacctgtccgctttccagcgattgcggcacgtcgatgatgcgttggttgctgcttccgcggaattgcagcagggaatcatgcagatctttgatgtaacggccgtccactagaatgtcgattagttcgagcagttcgcgcttgtcggggctttcgccttcgcgcataagttcttcccacgtgtagccggtccagcaccagatgtctttggcgttgccgaaccgttcgcggattttgcgcgcaagcggcagcagcacgcccgtgttgagcaatggttcacctccgaggaaggtgatgccttgtacgtacgattggcttaagtcgtccatgatctgcgtttcgagcttgtcgttgtattcgtggccggcttggaaatcccagattgatgtgttgtagcattcctcgcagtggaatgggcagccggacacgtacagcgagcatcggatgccttctccgtcggtcatgaggaaccgtttgtagtcggcgatcatgttgcggctcatgcgattggtccattgccctgctttgggattgttggaacgagttgtggggatgaagggcccgcgattggtttcgtccgctgcaaagtcacgacgttgaattgctggattcgcgctgctgatcatacgttgtcccttcacgttttgccgttgcgtcgcgtttttgcgattgctgcttgccttatgattatcacagaatgaaagagggtggaaatccaccctctttcatatttcgtttatgtttgctgccaatgcggcccttacttggcttcctcgaaccattcacgttcggaaccgtcgctcaaggtgacatgaccggtttcaccgctcatgtgcttgacgcggtgcgcgatctcctcgtgacgtccgtgcaccatcgggcgctgcaccgggttgcccaagtagccgcaggtgcgcttggtcacgttgcagtggtccgggtcggagttgccgcactccgggcacttgaaaccttcctcagtaggttcgaagtcgccttggaatccgcaatcgtagcagcggtcgatcggcgtgttcgtacccaggtagccgatgccgatgttgtaggcgtaatcccacaccgcctcgagtgccttggggttggactgcaggcacgggaactcgcagtagttgatgaagccgccggacgcgtagtacgggaagtccttctcgtagttgagcttttccattggggttggctgcagccagaccgggtagtggaaggagttggtatagaagtcgtggtcggtcacgccttccacttcgccgaacttctcatggtccatacggttgaagcggtcggtgagggattcggccggcgtggagtacacggaatagtggtagccttccgcgtcgctccattccttgcacagctcgttcatgcgcttgacgatggacagtgcgaattccttgccttgcgggtcccagccgtggtcgcgcatccagttcttgccgtagaacacgctggtcgcctcatacaggccaatgtagcccagggaaacggtggcacgttcgttgcggaacagctggtcgacgctgtcgttggcgccgagacgaccgaaggctccgaaacggaacagggttggcgcattgaccggcgcggcctgcttgcaacgcatgatacggaattgcaatgcctgatgagccacggccatgcgctcgtcgaagatcttccagaagcgatccttgtcgccgtgggattccagggcgatgcgcggaacgttcacggtgacgacgccaaggttcatgcgtccgtcttccacgtccttgccggtcgccggatcaatccaaccctgcaggaaggaacggcatcccatcggggctttgaaggagccggtgatcttcacgatgttctcgtagaagatcacgtcaggatacatgcgcttggtggcgcattcgagggcgagctgcttcagatcgtagttcggatcgcccggatcggcgttcacaccatgcttgatggtgaacacgagcttcgggaaaatggcggtgtggtgttcggaaccgaggccgcggatacggttcaggaagatggcacgctgaatctcgcgggcgaaccagtcggtgcccaaaccgaagccaacggtcacgaatggggtctgtccgttcgacacacgattggagttgatctggtattccatggtctgcatggcgtcgtagatggccttgcgggtctggatcttcgcccacacctcgcgcagctgctgcaaacggctggcatccttgttaaacggctcgtccatcggcagggccggacggtccttttcgaaatgcagacgcttcggttcgacatccttggccaagcgtacctggcgttcggcgatttcgatcggcaggtcgtcaggcatgatctcgtgggcctgctcaaggaatttatcgtaatctttcctggcatattcaacgaagtgctcatcggcacggttggcggtctggccaccatattggctggaagccacgtccttcatgatctgggtgatctgcgtggccgcaatggaaatgctgttcggcgagcccatcggcgcgttgccgagggtgaaaccgttggcgagcatatcccaatagttcggcagagagcagttggattgtgcggtgaacggcgagtagtcggcgtcgtggaagtggatgtcgcccttcatatgggcgttggagaccgcatccggcagcatggagaaggcggacgccttggacaccgcgcccgccagcagatcgcgctgggtggagtagacgttggaatccttgttggcgttctcgcgcaccagagcctcgtcacggttcaccaaacgcttgacggcttcgttgatgtcggtggccttggcacgttcgatgtctttgttcagacggtagttggtgtacgtgcgcgccacatcatacaggtggtcttcgatcaggccgtgttcaacgagattctggatgtcttcgatcttggcgggaccgttgtaacgatccttgatttcggcttcgacctgattggcgatgtcacggatcagctgttcctcctgcggcccgatcttcttatcaaggtcggcgaaggctgacttcaccgcgctgatgatgttgatcggatcgaagtcgaccacacgaccgtcgcgcttctcgacgagcaccttaccggttcccgttttaacggttgcggagacggcattcagagcctgcgtttccattcatcgtcctttccgggtcgaatcccatccgaccaggttttcatgctttgtttcgcatgccatatgttttctacgtccatagactctacgccatagccagcactaaatgtagtagcggcacgccgacggtaagactatatattccatttttcggcttgattccgccattccttaacctgtgtgacaaaggtaacgatttcaccacggagtgtcgcccgagtgtcgatttgacgcagacaccgaagagggactatacaaggcggggtaccctcacacgattcgaacatgtgtttcatttgtccgcaagatgatggaatcttgaactatgacttggaaccaggattacacacccccggaagcgcagccgaacagcaaaccgctgccgcgactggccggcgaaaccaccgctgacaacccctggccggtaagtctgctcagcgagaaattccacatggccgttgaacgatggccatcggtttgggtggccgggcagatcacgcagatcaacaccagacgccaaggcagtgcctacatcactttgcgcgatgattatcaagacattgcgttggaggtcaacggtttcgggcagttcgccgcagcagccactcctttcgtgcagggcgatcgtgtcatcatccatggcaaaccgaatctgtggatgaaacgaacctccctgtctttacgcggtgacgccatcatcgccgcaggcgcgggcggcagcctgaaagccatgatcgacgaattacgcaagaagcttaaaggcgaaggattgttcgacgccgaccgcaagcagccacaaccagagtttccgcattgcatcggtctgatttgcgccccgcaggcccgcgcggaaggcgatgtcatcaccaatgtgagattgcgttggcctgttgtcgatttcaaagtaacgcatgtgcatgtgcagggtgagcagtgcccttccgatgtgatcaaggcgatcgcgcagatggatgccgatcccgacatcgatgtaatcattgtggcccgtggcggcggcgctttcgaagatctgatcggattttccgacgaaggtgtggtgcgcgccgcggcagccgcccatacgcctctgatttccgcgatcggtcatgaggatgattggacgctgcttgatttggtcgccgatttgcgtgcatccacgccaacggatgcggcaaagaaagtcgtgccggatgtgcgcgagcagatgcagctgatcaatgtgaatattgaacgcatgcgcatgcgcatcgacgccaccgtcaacaatgaaacaagactgattgaaggctatgcgaaccgtccaagcctcacacagccgctcaccatgctggaaccacatcagcgtctcatcgatgatgcaagaacccgcatgagaatcggcctgacacgtattcttgacgacgcaagcctcaccatcgaaaaagcgcacgcctcactgaccgcgcttagcccgcaatccacccttaaccgaggctatgcggtagtgcagggagcggacggccatgtaatcgacgatgcgaacgctgtgaacaccggcgaccaactcaccatgacattgaagcacggcgtgatcgtgtccgaagtcaccaccgtaacgaaggagtagcaatgaccaacgaaaccacccccgcatccagcctgaccgacaaggaacgcgaagccatcgcacaaatgccttacgaagaggctcgagatcagctcattcaggccgtgcaggcacttgaggccggcggactcaaccttgaccagtccatgcgccagtgggagcttggcgaagccctcgccaagcgcgctcaaagtctgctcggcgaagtgcgtgccaagcttgacgcagcacaggcggaacaggccactgcggccaataccgctggcacgcaagacaatctggcctgaaaatctcaaaaaccgccaatatatcgtttctacatgactgtgcgccacgtacttcatgcagcgtacagtcatgcataaatttcgaatttcttcatttcggcaccacactcgtccggaatgtgtgtagaatgaagattcgttgcctcagtagctcagtggatagagcacttctctcctaaagaaggtgtcgtaggttcgattcctatctggggcactttttatgcggatacgcagccgatatgcagttgcgccgacactcttctcacacatcgaattgcacggttgccagcaacgccttgtgatcgcttccatcgattttcaacgatttggcccgacctgccaacatgccggaatccaatacgatatggtcaatgcccgcaaacgtcggtacataatcgatattcgcaggccacgtgaataccaatcccccggccgcttgtttggccgcatccgtgaaccgtgttcccaagaaattacggaacggcgtatggtcgtcggtcgcgttgaaatcgcccatgaacacgtacctacgagacgtatcgtaccggagtcgaccaagctcatccagtgaacgcttccactgctgccaatatccatcggtcggagacgtggtatgcaccgaaacgaaacggatctgcgtccgaccatcattgaatgcaaccgtggctcctggcatgaacgacgcgctcgaatcaacatcatcatcagccggatcaacaagcggactcgccgaccacaaaccattgccatacacgccgtctgagcttgccacctgcgcatacggcagcaaatcgccaataccagccttgttcaactcgtccacgaaagcatcggtcgtttcttgcaatgccagcacttccacacgctcgctacgcaccacatcgacaatttcctgcgcgtcggcacgacccttaaacacattgcatgtcatcaaacgggcataatcatcctgcgtattggcggacgctcccgaaaccgctgcgatcgcggcacgcggaagcttcgtctcattgtagaaaaacggatactgccaccatacttgcaacgcgatcgccgcaatcgccagcaataccgacattgttcgtttcgagacaatgccgcaaatcagcgcaatcaccgcaagaatcgcaaaccaaggcaccaacgaaacgataatgggaacatacggccacgcctgaatctcagcaggcagtatgtgcgaaacagtgcccagcaaagctgcaatcgacagaatgccagccagaaaaccgcatatgatattgcgcacgcgatgcgacttagttttcttcaacgtacgaacgggtttaacagccttcccctgcgctgtacgaggttttgtaccacccattgccaatcgccctccccaagttcctcacacacatcttatagacgcattgaaacagcatctattcctttggtggccttcatggcctaagcaccgccatcaattgccacccgttcaccttcgcgcatagtacagacttggcattgacttatgactcatacaacaaaaatcccgaggagcagtgctcgactcgggattcaaaaaagtttaagcgcggcaacgtgctactctcccacaccctctcgagtgcagtaccatcgccgtgctaggccttagcttccgggttcggaaagggaccgggcgtctcacctaggctatggtcaccgcaagagaaaagaatacgcgcatgcgcctcaatcaccaaatcacggcgtgtcgcactatgttgccgttcttaaattctcaagaacacaatatttctgcgctaaagtcgaaggcatgcaagcgtaacttccatgaaagaaggcaacaatgacgatagcctcctgcggatcggtttccgcaatcactcttggacttccgaattccaccgcaatctcctcagaaaaggcgacgttgcccaaagggctgtttgttgcgaaagttccggtttccgccaaaacgaagcagcgtctagccactgaagtcgaatcgatcacgatgctttctctgttgcgaccgcagaatacttcgctcgctgcagacaatcgcattcccgaaatactggtgttgggattacgtttgcatggcaagaatgcctcagttcctacggatgtcgtcgaattgatcgccatgcaacgcaagtcaggcatgctgttcgcctgcgtacgagatgccgaaattgacggtacggtacagaaggaatgcgcgtttgcagtgcgccgcgcgttgccgggacgcgccgggcatactccaacattcaaggtcttcgcctccgcatgggttcccgccgatgaagcattgctggatatttccgatccggctgtggattccatggatacgctttgggaatcattgtgcgcacaggtgattctcggtgattcatcccctgcagaagtggatgcccgcatggtacggaacgcgcaaatcgcgcagttgaaggccgatatcgacaagctgacgcgagatcaccagcgggtcaagaatccagcgcagcgcaacgaaatcttcgcaaaacttcacaaggcgaagaaacaactcgaggagctgcagggctgaaccaagcacccgctggcagttaggcgaataatcgtcagaaaccgaggcgagtgcgaccaaattggtcgagccagcgcagaatcgcgccctctcgcaatgcccacgggcagatttcgatttccttaacgtcgagcgccttcatgatttcgtcaaccaccagaccgccgccaacgatctgatatgtacgctcgggggttacacccggcagcgccacacgctggtcgggggaaatggccgcgagtcgcggaagccagtcttccagctggtcgagcgtcataatcgacgtgtccacacgacctggctggcgcatcaccgcgccggcgagacgagccaaggatcgaatggttttcgatgtgccgacggcatgcatcggatgcttcgacttcgggaaggcctcgaccatcgggtcgaggattttgcggatgttcctacgcgcgttttccagatccttttcgcttgcaataccgttctccggcaggaattcgcgggtgattctgccagcaccggcaggcacggacaacgccacggtcggatcttcgtcagaacccatggccacttcgagcgagccgccgccaatgtcgatcaccagcaggcgaccggcatcccagccgtaccatcggcgagccgccaggaaggtgaggcgtgcctcgtcaacaccggaaagcacggtgaccggctgtccgatggcgtcttcgatgcggcgcaggatcttgccgccattcggcgcttcacgcaatgcagacgtggcgagcaccagcagctgggtgatctcgtattccttagccagctccatggccttctccactgcggagatcacggcttcgactccggcttttttgatggtgccatcttctttgaggtactgcatcaggcgaacggtgcttttagcgctcgcctcaggctcaggtcgggctcctggagccgcatcgacgatgagcatgtgaacagtgttcgaaccgatatcaagcacgccgagtcgcgtggcatgcgaatgcaaactgaccataatccaacagcatacttactgaagcgcttaatatgttgcgcgacatgccattgacaacctttgcattttcttggcgcaaatcaggagaaaaagggtgtccgcccctcttatagagcgaaaaacaacgattgcaatcactgaaaagccatatgaaaaaaggcggctccaaccgatgtcgccatcgcgcaggaccgcctttatcacacaaacaacagtctcaacagaccccgtaagaatcagccacgcagcttgtcaacaaaatcgccaagacgacgcaacccctcacgcaacgcctcgcgcgaggccgcatacgacagtcgcacatgcgtgtccgcggtcgcctcgccgaaatcacgaccaggcgtcaacgcaacatgcgcttccttcaacgcacgctcacagaacgtccacgcatcaagaccagtgctggaaatattgaaatacgcatagaacgcgccattcggctcaacctccaacggcaaaccgatctcagccaagccatcgaccacaatgcgacgacgctccagcaactcctgacgacgttcctcgcacacggccaacgtttccggagtgaagcacgcgagcgccgcatgctgggtgggagtatgcgcgcacaggaagaagttggtagcgagatcgtccatggcttcgagcgcgcattcaggcacgaccatccaacccagtcgccagccggtcatgccgaagaacttggagaagctggagcatacgatggcgtccgggtcgcaggcgagcacggatttcacgtcggagccgtccggttcgcggtcggccaggtcaaggtaggtttcgtcgacgatacgccatgcgccgcgttctttcgccaggtcgcacacggatttcagggtgtcgaaggcgatggtggtaccggtcgggttcgacggcgaggtgatcatcaccgctttggtgcgatccgaccagtattcgtggcacagttccggtgtgagatggaatcgggtggtcgcattcgtcggcacgtccacgactttgccgccgaacgcgcgaaccagttcgcgattgcacgggtacgacgggtcggcgatcagcacctcgtcaccctcgttcaccgtcaatgcggcggcaagcagcagtgccgtggaacctccggccgtaatcgcgatacgtttcggatcgacgtccacatggtggcgttccttgtagaaatcggaaatcgcctgacgcaattccggcaaacccattgcggcggtatatggcaatggacggccatcatactgttcgcgcatcgcatcacgcactgcgagcggagcgccgaaatccggctcccccaagctcaacttgaccacgtcggtgcctgcggcgatcatctcgtcggccatcgcaccaaacaccatggcacggaacggattagcaatctgggcgcggtgcgacatctgcggcagcgcgctgttctcagcatttcccatagttcgtttgtattcttcagacacgacaaatcacgctgaatcacaagcatcgtctcaccgacgttacataccgtttcgaaatcaagaaaaacaagaaattaatcgagcatacatcacgtatgttcggcaagaatcacgcaattgcaagtagatcgcataaatgtcgatcaagcaggttgcgtgccgacgatttcatgataaagccgttccagccgttcctcacgtacttttttggcgagctcgcattcccacaccacgatcactttccagcccatcgtttcaagttcggcatgctgcctgacatctcgttcgtggttgcgcagcagtttcgcactccagaattccacattcgatttcggcacgcgcgtggctttcgggcagttttcatgcatatgccagaagcagccattgacgaacaccatcgtgcggtatttcggcaacaccacgtcgggatgtcccggataccgcttgtcgtttttgcggaatcgcagacctttcgaaaaaagaaaactgcgtaccatcatttcaatggatgtgtctttgcctcggatatgcgacatgatgtagcttctcgtgccacgctcgtatttctctttttttgcggatttccgaggttttccggtcttcttaacgtgttcctgcgctgccacagcacaccattatggcaagatccggcaaaatacggcaaatcagaaaagcatccggacgaaccgtgcaagtgcgatatggatcaacgcgcgttgcgatcatgcatggcgtacgctggaacttgcaacgcagcaaatataaatgaatcaacactattcatgcagtttacgaaagatggggtttgatatggctcgtattcgtgtcgcgattctcggcgcaggccggatcgcgcaacatatggctgacacgctggtgaaaatggccgaagacgttcgttatgcggatttggtggaaccgtatgctgtcgccgcacgaaatgcggtgcgtgcggccgatttcgccgcgaaatacggttttccagtttcatacggttcatatgaggaacttgtggccgatccgaacgtggacttggtgtacatcgctacgccgcacaatctgcatgcggaacaggcgatattgtgcatgaaagccggcaagggtgtgctggtggagaaagcgttcggcgcgaatgcggcacagacccgtgagatgttagccgttgcaaaagaaaccggcatgctatgcgcggaagcgatttggacgcgatacatgccgtcccgcgccattatcgataagattctcgcctccggtgcgattggtgaaatacaggcgatcgatgcgaacctgtgttaccccaccaccgcgaaggcgcgaatcactgatcccgcgcttgccggtggcgcattgttggatgttggcgtatatccgatcaatttcatcgacatgatcatgcataatgcgccgatcgctcgcattgaatcgtcgatgcgagcgtacgaaaccggcgtggatgcgcataattccatgacgttctattacgagaacggtgtgatggcgaccgcgcaaagttcgattctgtgccatagcgaccgcacgggatccgtgtggggaaccgatggttatatggtgtgccagaacattaataatgttgaggcgattgacgtgtatgacggcaatcatacggttgttgcacattacgatgttcccgcccagctcaccggctacgaatacgaggtggcggccgccgcacaggccgtaatcgacggtcgcaccgaatgcgaggaaatgccccacgcagacaccctgcgcatcatggaactcatggactccctgcgccgcgactggaacctcacctaccccttcgaacgttaagctccaatattagtttcagcgtcggcgaattgcgattccgttcacacagccgacgctgaagcattcattggcagcacatataatttctccttgcactggttgaggaggaacattatgggattgctgagcaagttcatgaacgcgcttattggagaaccgcccgtctccaaaacggcgactcagcccgggcccaagcttgcgcggcaaaacgttcccaatcccacgcaacagcagacgacgcaacgcaagtccactgtacaatcacgtcaaacgcaacagcttacgcaaccatcccaatcatcacagttggcgcgatcgtcataccgcgcgcaaacacaaaccacagctcgcaatacttctgtcacaacgaatcgttcgcgagcgcaatctcatgccaattcacaaccggctcagaagcttatgccgcaaccgttgcttcccgccgatcagattgcgcgggcgcgaaatatcatcggcaaaatcgaaaagcatgagttaagcgacgagcagatcagcgccatcgccggagctggtcacaatacgctagtgctcgcaggtgcgggaaccggcaaaaccactaccatcgtcggctatatcgcatggctgctgaacacaggaaccgccactcccgaagagattctggtgctatcgttcaccaaagcttccgccgacgaaatgtcgagccgcatcacgcaaagcaccggcaaagtcattcgcgcatgcacattccatagtctcggactggaaatctgccgttcctccactattgccaatcgtccaattattgacgggcacacgtcaaacaatgtggtgcgtaacgcatttgaatacctgcttgagcacaatgtttcctatcgtcttctggcatttaaacttatgtcgcaacagttgctcgataaatattccgcagctgcacgacttgagaatttccagttaccaacagacgattatgcattcaatcaatatcgtcagaatcttatcgataccgcacaaaccattatccagcatatgcggtcaaacaatattgacactgttggaatgcaagctcttaacgaacgttatggcggtaaaaacatcggtcgcaatcgtgagatgctgcagctcatagaaccgctttatcatgcctatatacagaatttcaaaaccaataatggcattgattttccgggaatgatcgttgatgccatcagttgcgtcaataatggctcgtaccggcacccatataaatatgtgctgattgacgaatatcaggacatgtcacgaccgcgctatgagctaatccgtgcgcttcgcttgcaacatgatttctcactattctgcgttggcgacgattggcagtcgatttatcgttttgcaggcagcgaccttcatctcattctcgatttcgaccgaatttggcgcgcctggggtccgaccttcatgttccagatcaccaccacacggcgcttccgtcaaagccttattgacgcaagcggagcattcgtgatgcgcgataccaatctgtatgtcaaacacttgcataatcccagcgataagaaggactactctctgaaagcacttggcgggcatactgaggaagaacgattcaatgtaattgtcgagcagttgcgtaaactgccgaaaaccgcgtccgtactattgcttggccgatatcgcagtgacatcaatctcatgattcgttgcaatcaaaatggtctgttctccattgaccagagcactggtaatattcgttttcttgaaaaaccggatatggatattcgtttcatgaccgctcatgcttccaaaggattgcaacgcgatttcgtatttctgctgtgctgttccggcggattgaaaggtttcccaagcacgattcccgaagagccgctgcttggtctgctactgccggaagtggagcgatgcccacatgcggaggaacgtcgactgttttacgtggcgatgacccgatgcaagaagaaactgttcttcatcgtggatcagacccgcccgtcgcgattcatgtatgaactgcataacaagatctgcccgaacattttccgaggagtcaaacttcctccgcaatgcccgaattgcggcgaagccctaagcttgcggcacaatcgcagcgatccgaaccgctcattctacggatgcaccggcttcccgagctgccgctacacccaacaagcaaaataagcgtggcatacgtgatgtgaaagttttttcttccagagatcatctccagctcttcgccaacgtctgcatgccctatgccgttattttgtttcaatcttttgggcctggcgcgatcgcccccgttgtatcctggatctgattttccgacaagagaggaagccacgatgccacgtaagatcatcaatgttgtgggcgcggccattatcaaagatggcgaagtattgtgcgcacgccgtggcgaaggcaagtcgctggctggatattgggagtttcccggaggcaaaatcgaacttcacgaaagcgcttcgttgcaccgatgatgagcttggattattttccggaacgagtaaagagcatgatcgtaaatatgtgtttgccactgtgcaaaccatgtctcgtccggaaattcttgcacaattcagcaaagatgatttcgattatattttgatcgacgaagttcaccatgccgccgcggattcatataagagaattatcgattatttcactcctgatttcatgcttggcatgacggcaacgccggaacgtactgatggtgcgaatatttgtgacgtgctcccgccacctgaccgcttcgcggtctgaggggggcttcctgctcaaggctcctagcggagtcagtgtctacaggctattcccgtgcgccccacggttctcgtaagttttttgttatcattcctgcacgagtcgtcgtgtttcgtgcatgatgttggtcgcggcgttcacgtccctgtcatgccagaccccgcaatcggggcatgtccattcgcggatatacaggttcttcgtatccttattgcggtagccgcaatcggagcatagttgactggacgggtagaacctgtctaccgtgaccagctgcttgccttgtcgttcgagcttgtatgcgagcatggtgcggaacatgccgtacccgttgtccatcgtgcttttgccgagtgcgagggattggctcatgtccttcatgtccaagtcctccacgccgacgcaatcatatcgggcggcgagccggttggccgtcgtgtgcaggaagtcggctcgctggttcctgaccttggcggcgagcttggcgatgcgccgcttctgtttcacccaattaccggaccccttgaccatgtggctgagtctgcgttgctcgcgcatcagccgtggctccatctgccggtagaaacgcgggtagtcggcttgttcgccgtcgctggacacgtacaggccgtgggaggcgtaatccaatccgacgatatgcacgggtcggacgggttcgggtgcttgggtctcgtactcgaacagtatcgtcgccgtgtatccaccgctcttgagatgttccaccgtggcgcttttgagcttccagtcatcgggaatcgtcttgtgctggcgggcgcgcatcacgcccactttgggaagtttgaggtatctgcctccttcgatgagtcggatgttgcggttgttgttgttcgtcgtgtaccgccatgcgctgcgatgcttcgccttgtatttcgggaagcccacatgcttggggtcgcggaagaaattgttgtatgccttcgccacgttcaattgggcgttgcatagtgcgagactgtccacttcgcgtaggaacggatactcgtccttgtactgggcgggcgtggggttgcatgacttgccggtgcgattgtacgtgtcgatgcgggtttcgagcatgagattgtagacgagtcgcgcgcaccctatcgtccggtcgatgagaccggcctgggccttgtccgggtagatgcggtacgtgaccgcgcaatgccgtgtgacctgcatgacgcgcctcctacctgcgtccctgattctcgatgtagcgtcgtaccacttcgatgggagcgccgcccgtggtcagcaggcagaagctgcggctccagaaatactccttccacagtttctgccgaatctgcggaaactcctgcttgagcagacgactcgacgcgctcttgtaagcgttgatgaacttgctcaactcactcttcggctgggcgcggaacaatacatgcacgtggtccatgtcgtggttccattcctccacggttatcccatacttgggtgcgatgtactcgaatatctcacgcgcacgcgccgaaacgatatcgtcgaacaccttgcgacggtatttcacgacgagcacgagatgataatgcaacaggaacaccgaatgatgattcgactccaattccattgtcacctcctcgattacaacatgtacgactgaacatcattataacatgcgaacgcacgccaattcatctcccgcctacgctccgcttagagacgggagaatccttggcgaaatcagttgaattatttggcaataacgtcgcgtatgagattcgcttgcagaaggcgcttgaagaggatatgctctgcccgttccactattacggggttggcgaatacattaaggaagcgccggacggcaagtttatggggcagcaggtttccgctgattccatgacagacaaggatcgcactgagttttcccgttggctcgaacagctcaccgaccctaatcgcgtgcgctatatcatcgacaaaatccagatttacagcgaagccggaaccgatgtgcgcggtttggtgttctgttctcgccgtgatgaggcgaaacgtctgtccgccatgttcaacgagcaggtgaatcagcaggcggaacgaccgtatcgcacgaaagccattaccggcgaaaactcgcaagctgaacgtgacgaagctgtcaaacagctgaaaatggcgaacttgactatatcttcaccgttgatttattcaatgaaggtgtggatattcctcatatcaaccaaattgttatgcttcgtcaaacgcagtcgagcattattttcacacagcagctcggccgaggtttacgtaaggcaagcggtaaagattcggctgtagtgattgattttattggcaattacgccaataattatttgattccgatcgcattgtatggcaatactggcgatcgtgatgtggcccgtaagaatcttcaacgcgagtccatcggcatttcttcgatcagtttcgataaaatcgcccgcgagcgcgtgctcacttcactcgataccgctgatttgtcggatatgaagctgctgagcaagcagtatcagcagatgcgctatgagttgggtcgcattccgatgctgatggatttcgcgcatcgcgatgcgtctttagtgttcacgttggcttcgaagaataacgattatctgtcgttcgtggtctctcgtgagaagagtctgtcgcgcggcaagcatgcatcggcttcgtatgtggagcagcttgaaccggtgtcaaacgcgcagtctggtgtgctgaaaatgctgactgcgactcagttgcgtggtttgcgcccgcatgagtcgttgattctcgcggtattgtgcgatttggattggcgtcgcatcaatccggattgttccgacgatgatgcgtcactatttgaacgtttttccacacagcacaacttgagtttgtttgatttgcaaacattattgtctacgctgtttccgtatgtcgataataatattcagcagtgcggttctgctttttccacattgaattattcgtatttcacaagtgcgaatcgcactcgtttcggcaatacttctttggtttgtatgtgcgacaatgaatcgtatgcattgacccaggaatgcgagtcaatgctgcatcacgcaacattccgaacgttctttacagataccatcgaagccagcttgttcaatgcgcttgcactgtcaagggaagctcgcaagcgtcgcatcatgcctgatcatgggttcatatatggcgagaaatatagtcttgccgatgtcatgcgattgtgcgcgtggaaggatgagcagattccgcagaatgtgggcggatataagcttgacacctacacgaattctttgccgatcttcattaaatatgaggcaagccagtatggcgatcgtttcttgaatcctggagaaattgaatggttcagcaaaaacaatcgttctttgcaatctccggaattcaaatggctgcttgatggaaccgagcatacgtcggaatggaagaatcgtcattttgttcccatttttattcgacgtaaggccgaggaaaaggagaaatcctactattatgtcggttcggcagtagctgtagacgatgcgcatgagtcagtgaatatcgcagatgacggaacccaatcaaaggtcgtgatttccacactgaaactcgcgaaaccggttgaccccgaactctaccgtcacctcaccggcaacccagcattctagttccagaaaattgctgacgtggcggaaagtcattgttggaccgacggccgccacgcctcagacatggaaaatgtcacctcatctgcaaaaagtgacacagtgcatcgtcgatgatcgctcaagccttttcaaaccaccttttcacacgtgcaatccaccctacaatcatatgcagatgttcgtttgaacagaaaagtaacatgtttttgcagaacaaaaagaacacgctcaatgttactttttacaatgtcattttcaagacctgcaatcattgcaacatcaacgattctcagcatcatcaattgcaaaaacagtattttccgcggtatcacagctaaaaaagcgtgctatcgttagtcacggatacagcaagcatccatcaacaacatgaaccagacttcaagaaatgatgttcgtttgcttatctaaacgaacattaaaacgaacactactaatgttcatgacattatgcgaacacatcgcaggaaaggaattcatcatggcagatgaaaagaccgtcatcaacgtggatctgaacatgttcggccaggacgcggacgccaagaccgccgcagccaacgaggttgccaagagcctcggcatcagcgacgaagccctcgctcaggtggaggaattcaaggcagccctcaccgcgcataacgcttgggacctgccgttcatgggctacgtgaacgaagacggttacggctacgcctatgtgccggacgcagccatcaccatgaacccgtattgggatgcgcacaaggaattcatgaacctgccggaagacgtgcagaccgctttcgccatccgtatgctgttcacccaccgccctgtcgaccgctacggcgccgacatgttcctgcactaccaccgcggcttccaggtcaacttcgtcggcagcggcgccaacaagtactgaccgccccagaggacgttgtatgagcgccccataggacatataacgattcccataccgccgcggcggtactctccagaaaaagaaaagcgcttggctcgagccagaaaaaccagctcaagtcaagcgcctttcgtatgcgctgaaacgaaactaccgcgcgtctctaaaaatcgcccatatcaggcgcatcgaatcccatgccaggtccttccggccccggaccgcccggacctccgaggaattcgcgcgctgacatgccattttccttacgggatgagtccacggcctcctgcatcacccggcgaacctcaaaaccatgcaccacgttcttcagtaccacaacaccgttgccggaagactggtcgcgcgtatcaagtaccagcgtgctcaaaccgaacaggcgctgcaggaacgtgcgctccacactaatatccacgatgcggaatagtttgatgagattgaatttctcgttaaggatgccggttttgatgctcatttcctgatcggtgagcatgtacacggtgaacgtgaacggcgtacgacaccaattacgcttgcgctgacgccacagaacattaccgcttgcaaccttcatatcattcccttttccttcgatggaaagccgccctgttgcggcaacactgccattctaccgggcgccgccgtacggccatgccgctcattccaaatcatgtttcacacatcgtttcacacagtatttcggcataatcttttcgctcaatcaaaaagaaatgcaacagcattcaagcgactattcaaaatcatcggcttttcgccgtgaaaagagcaaaaaacatgcgcgacaacggcagcatgatataggctgaataaggatatgtcttgttccacgaagcacccgtcgtcaacgcggcacatgcaatccatgtttttaaaggaaaggcatgcaatgagcaacgaacacggtaggatcaaccgtctgcaggaagtcgaggatctcaccgagtacatcaacaatggatggctgcattccggcgaatccgacggcccgacgttcctatggaaccacatgatccgcgaggccagtcaggaagatgccgaaaaccgcaataatgtgcccgtagcacagctttccgacgcggacatggtaatcagtatgcccatgcaatggtatttcgattccatcgccgccatggtgcccacagccgaacgcaccgataccggcgtggagattccaagaatcgacatgccaacgttccatcttgattcgcaggcgctttccggcgtggacgcggtggtcggcaatgccatcgtaagcacacgttggctggatgctgtcggcaatctcgccaaggcagtggaaatgaccgcgcgattcgttggcaacgtcgcagatcgagacaatgagggcttcgactatttgaaagacctgattcagaccgtgcgcgtgtacatggacgccgtggcctgcaatgccgatcccatgaccggcgaacaggcgctgaatatcatcacgcaagtggcctgcaatgaggattttcgtcttaacgccatgcaaatggttgaattgctttcgtgcggcctgtcgttcgcgcaatgggacgatacgcgcatgttcgcttacgatgcgttgaataagggcattgccacgatgagtgatttcgcctcgtctgcttcgaggttgtcaaactcggcagatgattccgacagtcgcgacatgcaaactgattcgcagtctgttgcgcaagtgaaaaccgatttgggtttgtttgaagacgctgattccttatccgcagaagatttgaataatctcgcgatgcttgatcctgctttgctttcagaaaaggagattgcgcaggccgcgcagaatcagttcgatcatgccgtacagtttttgcgacatgacttgctgcggattagtggtgacattgatgaggctgatcgtttcctgcgtgacaatcatacttccgaaccgctcgccgatgcgtatgcggcacgtctgattgctgccgaacgttggcaggatctgctcgattttgtcgatctggtgttgcgggacaaacctaatcaggtcacgatgatgttccccgaagaagtggtgccctacgagtgggagacgattcgtgaggccgctttggaagcgctgggacgcagcgacgaactggttgccatgtatcaggaacgcttggatgatacgtatgatcccaataccgcgctcaatcatctgaaactccacgcctggttgaatcagcggtagtcccgattcctccactcactggaacaatcctcccgcccacgggccttccggcgtccgtttccctccaccgaatggaggaagacacccgtgcgcgggaataagaaaaggggttcccggagcgtcgcgcccggggatcccccggaaaccggaagacaaacaaaaaaagggggttcccggagcgtgacgctcgacgggaaccccgacgttgaatgcggcggcgtgctactctcccacaccctctcgagtgcagtaccatcgccgcagccaggccttagcttccgggttcggaaagggaccgggcgtctcacctgggccatgaccaccgcaaaaccaatacaacagccaaccggaagaaccggcggccggcaacggaaccaaccacgattccgatcgtggcggtccgggaaccggacaacggacgcgagcaaccaaacgcttcaccggtatcgtttccgtgaccacaagaaacaatgctccttgccatccaacgaaagaaaccaccacaggacgagacccaacccaacaaggattggaaaaatgtgccgcgttcgcccgttagtaccggtcggctccacccctcgcggggcttccacctccggcctatcaaacacgtgttccacatgcgggctacaggcaccgaagtgccaaggaatcctaatcttggagcaggcttcccgcttagatgctttcagcggttatccctcccgaacgtagccaaccggccatgccgctggcgcgacaaccggcataccagaggtccgtccacccaggtcctctcgtactatgggcaggcctcctcaggattccaacgagcgcagaggatagagaccaaactgtctcacgacgttctgaacccagctcgcgtgccgctttaatcggcgaacagccgaacccttgggacctgctccagccccaggatgcgacgagccgacatcgaggtgccaaaccatcccgtcgatatggactcttgggaatgatcagcctgttatccccggggtaccttttatccgttgagcgatgccgcgcccgtgcgccggcaccggatcactatctccgactttcgtccctgcccgaaccgtcgttctcgcagtcaagcccgcttgtgcgattacactcgaaacccgattgccaaccgggctgagcggacctttgagcgcctccgttactctttgggaggcaaccgccccagttaaactacccgccaggcactgtccctgaccaggatcactggccgaggttagacgtcaaacgagaacagagcggtatttcaccttgcggctccacacgggctggcgcccatgcttcgaagcctcccgcctatgctacacaatccgcgcctaacgccaataccaaggtatagtaaaggtcccggggtcttttcgtccttctgcgcttaacgagcatctttactcgtactgcaatttcgccgagctcctggtcgagacagtggggaagtcgttacgccattcgtgcaggtcggaacttacccgacaaggaatttcgctaccttaggatggttatagttaccaccgccgtttaccggggcttgaattcaccgcttcacccgaaaaggggctgacggatcctcttaaccttccggcaccgggcaggcgtcagtgcatatacagcggcttgcgccttcgcatgcacctgtgtttttggtaaacagtcgctaccccctggtctgtgccaccccccaacgctccgagggcaagcctcttcacgcccgggggtctcccttataccgaaggcacgggagtgatttgccgagttccttgaccaggattcgctcgatcgccttggtattctctacctgaccaccagtgtcggtttggggtacgggcggcaacgcccctcgcgccgaggcttttctcgacggcctggaccaccggatatcgcgccacaaaagacgcccatcatcacacctcaccctacatgccccacggatttgcctatgggacgggctgcgtgcttgaccacggaaaaccacctccgcggccggctcccattccgtgtcacccctgtgcgctaacctaccaggactacgctcccaacaaccgcggaccccgaaccccgaagggaacgacgccacgcgaccggaggttagtactcatccgttcggctcttacggtacgccgccggtacgggaatatccacccgttcatccattcgactacgcctgtcggcctcgccttaggacccgactcacccggggacgacgaacgtggccccggaacccttggtcatccagcggacgggatcctcacccgtctctcgctactcatgtctgcattctcactcccgcgcggtccacggcacgtttccacggccgcttcgccccacgcgggacgctctcctacccagcagccgcaaaggctgctgccgcgtcttcggtggtgtgcttgagccccgctacattgtcggcgcggaaccactagaccagtgagctgttacgcactctttcaaggatggctgcttctgagccaacctcctggctgtctatgcgactccacatcctttcccacttagcacacgcttcgggaccttagacgacgatctgggctgtctccctctcgacgacggagcttatcccccgccgactcactgccggaatacacatccacggtattcggagtttggctgctattggtacccgacacgggcccgcaagcatccagtagctctacccccgcgatgcaatcaaccgacgctgcacctaaatgcatttcggagagaaccagctatcacggaatttgattggcctttcacccctagccccaggtcatccccccggttttcaacccaggtgggttcggtcctccacgcggtcttacccgcgcttcaacctgcccagggctagatcatcccgcttcgggtccagggcgcgcgactcaaaacgccttttgagactcgccttcgctacggctcccccaccacgggttagcctcgccacgcaccactgactcgcagactcatttttcgataggcacgccgtcaccccacacggaggctccgacggattgtaggcgcacggtttcaggaactctttcactcccctcccggggtgcttttcacctttccctcacggtactggtacgctatcggtcagacaggtatgcttagacttaccccacggtcggggccgattcacacgggattccacgaggcccgcgctacttgggacgcatgatcggaagacggcaagcttccaggtacggggctggcaccctctgcggccaggccttcaagcctgttcccctggcaagccgttttatgactcccgcccggtccgtcggaaccgggacacacgctccctcaacaccacggacgcaacccccgacgggtatcacgcgcccatggtttggtctgatccgctttcgctcgccactactcacggagtatcccttcctgcaggtactgagatgtttcacttccctgcgtacccccggaacaacaacgttccgtgccggcccatgacggccggcgggttgccccattcggaaatcctcggatcgaagccatgttggaggctccccgaggcttatcgcatcctcaaacgtccttcatcggtactgtctgccaaggcatccaccatacgcccttcagggcggcacacgccccgaaaaacccaatgatagcttcaaacgccagacgacaaatcatcacactgtaaaaaatgatcacaaaacgatcgatctcgaaaccagactctccaaaaaagaagcctggcgaaatcgcgataaagcaaacgatgacataacatcatcgcattgctcgcgtccactatccagttctcaaaccaccacgcgccccgaccggacccggcccgcggcccgcaaggccgacggcgtcccgccaggggcatccggaaaaccgcacgcgaccaaacgtcgcgggtggcggtccgggaacccaaaagcatatccgcaccactccccgccggccccaagggaaccagcgaagcccatgatctcttccacaccagcacgcccacgccagaccggagacgatccccggcgcatgggccacacgacggacgacaaaccatcgtcctgaaaaactccgtagaaaggaggtgatccagccgcaccttccggtacggctaccttgttacgacttagtcccaatcacgagtctcaccttagacggctccatccacaaaaggttaggccaccggcttcgggtgctacccactttcatgacttgacgggcggtgtgtacaaggcccgggaacgcattcaccgcggcgttgctgatccgcgattactagcgactccgccttcatggagtcgggttgcagactccaatccgaactgagaccggttttcagggatccgctccacgtcgccgtgtcgcatcccgttgtaccggccattgtagcatgcgtgaagccctggacgtaaggggcatgatgatctgacgtcatccccaccttcctccgagttgaccccggcggtcccccgtgagttcccaccatgacgtgctggcaacacagggcgagggttgcgctcgttgcgggacttaacccaacatctcacgacacgagctgacgacgaccatgcaccacctgtgaacccgccccgaagggaagccccatctctggagcggtcgggaacatgtcaagcccaggtaaggttcttcgcgttgcatcgaattaatccgcatgctccgccgcttgtgcgggcccccgtcaatttctttgagttttagccttgcggccgtactccccaggcgggatgcttaacgcgttagctccgacacggaacccgtggaacgggccccacatccagcatccaccgtttacggcgtggactaccagggtatctaatcctgttcgctccccacgctttcgctcctcagcgtcagtaacggcccagagacctgccttcgccattggtgttcttcccgatatctacacattccaccgttacaccgggaattccagtctcccctaccgcactccagcccgcccgtacccggcgcagatccaccgttaagcgatggactttcacaccggacgcgacgaaccgcctacgagccctttacgcccaataattccggataacgcttgcaccctacgtattaccgcggctgctggcacgtagttagccggtgcttattcgaaaggtacactcacccgaaggcttgctcccgatcaaaagcggtttacaacccgaaggccgtcatcccgcacgcggcgtcgctgcatcaggcttgcgcccattgtgcaatattccccactgctgcctcccgtaggagtctgggccgtatctcagtcccaatgtggccggtcgccctctcaggccggctacccgtcgtaggctcggtgggccgttaccccgccgactacctgataggacgcgaccccatcccataccgatacaatctttcccagcccaccatgcggaaggctggagcatccggcattaccacccgtttccaggagctattccggtgtatggggcaggtcggtcacgcattactcacccgttcgccactctcaccaccaagcaaagcctgatggatcccgttcgacttgcatgtgttaagcacgccgccagcgttcatcctgagccagaatcgaaccctccacaaaaaaacatcatggaaagacatcgaatagatgactctcaaaaacaagaaaattgacgatcgccttataaggaaaggcgcatcgcacgaaaacctcaccgtccttcaaggcctcccggccactcgcgaacgagcggacgatgaactggcaatcattgactataaagaagtagtacaaatacgctcttgagttctcaaaccaccaccacaccagcagaccgtcccgaacctcaggagcggaaccgccgtgctgagcagcgagatgtaaacttacacgtccttgccgatctacgcaaatcgaccttccgtaaacaccgtgtaaaccgttgaaaaataacgtatctctcggcgtgtcgagatcgcaggaaaatcgagtgatgagcaccattccacagcacaatcccgctggaaaaacctcaacatacctcgctacaggtcaacatccgggcgtgtcgcacacgagacgaacgaatgacagaaaggtacaagacaaacagcgggcaaaacatccagcgggaacagacacaacacgactacgcctgacacacatccagcaacgtcaattcgtccgaccaacttacgccttgccacacaacctgcgagcgactccgtctaccagcgcttgccacagcgcttgccaccattgccgggcctgccaccggcgccccacggcccgcgcccctcggcatgcagcacacccagatgatgcttcatggcgaccagcatgatgtgcgtatcttccaagccaagatgtcgttcgcttttggatgcatccaacgcgccctgacgtttggcatacgcttccaacgtattgttgccgtgcggatgctcatcatcgggaatcgacccctcatcccaacgacggctcatcggcaatgtgtcgatgatcgtgatattgccggcacgatagctttccgcatatccggcgacgttcagcatgaaaaagctatgctcgaaccgggcgttatgcgcaacatatggctgctgttcgagtcgttgcagcaatccgatctgagcttcgggccattcgtcgaacagacgaaagtccgcgctggcgcgatcgcgcacgtcaataccggtaaggtcgagaatcagaggattgccaagcagcgcattctgcgcgggaacgccgaaggaaagacgtgcctggccatatgcatcgccggtctcgtaataatcctgttcgtagcggtagcccgcgggctcgccggcaggacgaggcgagatcatgttcatgaattcgaatccggcatcgatgatgtacacgcgagccggatccgtacccgtagtttcgatatcaatgcccatcaccgtgtcgacgtcacggccgggaaggtaggcgtcacgccaatccgactttttgtaatccgccaaacatcggtcctgcgcagcttccgccgagtcagcggaaccgccagcggatccgagggagccatagtcgaacaccttcgagcctcccggactcgtcaccccgctcaaattcgcgcgtgacatggcgtaatcgctggcacgcttctgctcacgttccgcggcacgacgttcggcacggccattgacgatctgcgcggtgcgatcctgaatatcgtcaagattcacgaggctttccgctccggcaacaggctgcagcacaggcactatcacccgctcccgccgctcttcggcaatcgtccacaatcccatcgcaacaccaatgcgccgcaacacggcaatttcgtcgcacaacctacggttcgcataggcgagcgcgcgaggcaaacggtatgaagcgatcagacggtcgaaatccgtcatgaaggtggtattgcattgcgcgatgatggattcgagccggtcacggaccgctaaatcctttttcagcagattatgcaactgttggacggatagtaccgaatcctgcatggaatccgttttctccgaggtcgacgaaaacgcggtatccgcggcattcagaacggcgatcaggtcgatgccttggcttttggcggttccgatgccgtgttccaagtcgagagacatgacccaatgccagtcaatgcgctcattgtcggcgtttttcggcatcgatgccgaccattggctgatgtcttgtttggcttcggtaagccaggaacggcccgtctttgcttcgttcatactttgcatggtagccgagagggggcgcagtacacgtcggctcgtgcaaaaaaccatgatgcttctcggatagcgcaatcttaagttttttgagattcgaaaggttatcttgggttcgttttatttcgttgattttcggtaagagaaagaacaatgctacgaaaaacgattatgttcaccaagcattcgtcatcaggatacgatcatgcgcgttgcagacggagcacgacgtcgcgtacgaaatcattccatcgcaacacgaacgccgatattgtcgataatgctgcgaaatgcaaacatggttacgctcatacgtgcgtctgccgtggggagtatgacgcgtgcgcgcgttgcactggttatgcgcatggtggtatgacgaaaaaatgacgctatgacaaaaagggagaggcctgtgggcctctccccctgcaggatattccgcggattgcgcaacgataggattccgtgacaatcggattccgcagcgtttttcgccgcgcatgtatgcgatttgcggcgtgcgctcctggtttacagttcgaatccgagttcggcggcggcttcggtgggaaccggatcgtcgcaccagaaatcctcaagattctcgttggtggcgaggctgcggatttccgccttgtcaatatacagttcgccgctcagatggtcggtttcgtgctggaagatgcgggccggccagccgtgcagatgttcctcatgctgtttgccgtcttcatcctgccagcgggcggtgatgtcgagccagcgcttgcgtaccgcctgatagccgtcgaagctcaggcagccttcgtagaagctgcgggtttcggtgccgatcggctcatagcttgggttgatgatgacgtggaatgggaattcggacgcttcgcgcgggtcatcgtcatcgtcgtcgcgcacatggtcttccaccacggcaagcgccagtccgaggccgatctgggttgcggcgagacctacgcccggcgcttcgatcatggtgacgcgcatggtttcgatgagcttgtcaagtgtcttgcggctcagttggccttcgtaggctgcggtctgctggcgcagtaccggttcacctgcctgcacgatgggaagcagttgttccttgccgccggttttgatgagtttttcgacctcgcggttgagttcgaggttgactttcgagttgcgtccaaacatggggttccttcgcggattggttcgggattttggattgccaaatactgcgtatcggcggtgtgattacaaggcgagttcttcggccacgactttggcgagacggtcgcagacctcgtcggcctgctgctgggtttccgcttcagccatgacgcgcacgagcggttcggtgccggagggacgcaatagcacgcggccggtgtcgccgagcattttctcttcgcgttcgacggccgcctgcactttggcgttggttttggctgcgagcttgtcgacgtttggcacgttgatgagggtttgcggcagttgcgggaagtcggatgcgagttctttgagactcttgccggagttgaccacttcgttgcatagggtcagtgcggtgagtgtaccgtcgccggtggtggcgaattcgcggttgatcacgtggccggactgttcgccgccgagtgaatagtcaccacgcagcatttcctcaagcacgtaacgatcgcccacgccggtttgcacggttttgatgcccatggaacgcagggcgagcttcagaccgaggttgctcatcacggttaccacgagggtgtcgtggttgagtttgcccgcgtttttcttggcacgtgcaagaatgcccatgatctgatcgccgttgaccatattgccttcgccgtctacggcaaggcaacggtcggcgtcaccgtcgaatgccacgcccaagtcggctccggatgccttgaccatggcctgcagctgttcggggtgtgtggatccggcgttcttgttgatgttgtagccgtctggcgaagcgttgatcacgctcacgtcggctcctgcgcggcgcaaagcttccggcgcgaccacggaggtggcgccgttggcgcagtcagccacgactttcaagcctttcaacggtgtcggctgggacttgtcaggcccgatgggggcgattgtggataccagatggtcgatgtacaggttggttgcggttgccgtgtcgtggctgatacgtcccacgcctgcaccggtcgggcgttcccaatcctggccgagcacgttttcgatttcgtcttctttggtgtcaggcagtttgaatccgccgcgtgcgaagaatttgatgccgttgtcgggcatgggattgtgggatgcggagatcacggcacccatttccacgttcagcacggaggtcaggtatgcgacgccaggggttggaataatgcccgcgtcgatcacatcgaaaccgcctgcggacatgcctgcagacagtgctgcggcgagaaaatcgccggaaacgcgggtatcacggccgaccagtgcgcgacgacggccatcgaattcgcttttgccgccgtcatcgccaagcacgcgcaccgcggcatcgcccaaatccaatgcaagctgtgcggtcaaagccctattcgccaatcctcgaacaccgtctgttccgaacatacgtggcatgagtcttaagtcctcgctatctcaagttatattgccgtgcaccatcgtactcaacgggttcaccattcaacgaaacagtcgagagcatgttgcgatacctgcatactgcggtacgtaatgttgcgcaaaccgcagtatgcaacggcgcgggcttttccgcaatctcacgcttccgcaatatcgcgttattcgcgcaataccgcattcgacagttgcgccacgaacaggccttggtctcgagtgacgatttgggcgcgaccgggcgccgccttcttcggtttgactttgccgatcagctggccttcgttcgaatctccggacagcagaatgccggtcatgccgagatcatggaacgtctgcaataccggatcgtacatggctcggctcgcaccgccggttctgcgggccaccaccacatgcaatcccagatcggaggcctgcgccaaatatggcaccaacgcacgcagcgggttgcctcggctggtggagaccaaatcgtaatcgtcgaccagcacgtaaacttccgaacccgtccaccaggaacggttacgcaactgttcggcagtcacgtcctggcccggaatgcgggttttcaggaattccgcaagcgcgtcgagactttccgtagcctgttcgtcattggtcaggtacgctccaaaatgcgactgcggaatttgcgcaagattcgcacgacgataatccaacatgaaaatttttgcttttccatccggatagcttcgtacgatttcgttgattatcacgcgaaggaatgtagatttccccgaaccggcgtcaccgaataggtaacagtgcggttcggtgttgaagtcgaacaccactggagacagtgcgttctcgtcgataccgaccaccatgttgcctttggcgagctggttggatgccttttgacgcatgacggaagccatcatcacctcgtacggcaggttttcgggcagcaaccgcagcttcggaccatgcggatggccttgccatgcggaacgtactttggcgatgagatcgttgatgccgtcggacaccgtcgccgcatcatgcccgccatcgatgcggggcagcgctgcgagcgtatgcagtttgttggcgctcaggccacggccaggcgcgcccttgggcacggtgtcggcaacgtggcggtcgatttgcgaatcgctcggatcgcccaaacgcagttcgagcttggtgccgataaggtcgctgatattggcacggatttccatccaacggttcgcgctgaacaacacgtgcacgccgaaggtgagaccacgggcaacgatctgctggactttggtttccaattcgtcatagtcgccgcggaatacgccccaaccgtcgatgacgaggaacacgtcgccatatccgtcgtcgaccttgccttcggcgcgacggcgacgatacgcgcccatgccgtcgatgcgctgttctttgaagaatcgttcgcgcgcgtcgatgatgccgctgacttcggcaagcgtacgacggactttttcatcctcattgcctgccgcgatgccgctgacatgttccaatccatccatggaggagaacgcgccgccaccgcagtcgatcacatagaactgcacttcgagcggcgaatgcgtgagcgccaacgatgcgacgatggaacgcaacatcatgcttttaccgctcaacgggccgcccaccactgccacatggcctcccgcaccggcaagattgagggccatgacgtctcgcctctgctcgcgtggcttgtcttccaacgcgcatggtacgacaagcgctccggcattgcgccaccttggcgaaatcaagccatactccttggtgacggtcaggtccggcatgaaatcgtcgagcgaattcggcgtgaccagcggaggcagccacaccacgtgcgcgggattgcctttgcctcgcatctgttccaccgcatactggaaggtggtggtttcgccgtccaaccccttcggcacgcccgacacgtaagacgcgcggaagcgggtgatggtgccgtcaggcgatttcagatagccgatgccaggcaggcttggcagatcgtacgcgtccgtaatgcccagcacggcacgggattcggttgcggagaacgttttcagaccgatacggtatgacaggtgctcgtcaagaccacgcagcttgccttgttccaaacgctgcgatgcgatgagcagatgtatgcccagcgaacggccgaccgcgccaatgcgaacgaacgattgcacgatctcaggtttcgccttcaacagttcggagaattcgtcgaccacgaccaatagtgacggcaacggtttaagatcgctacgcccaccgttgacacgcatctcctcatattcggtgatgttggcaaggttgcccgcatctcgcagcagctcctgacgtcggttgacttcgccatccagcgcgtcttccatacggtcgacgagcgacgcttccttgccgagattcgtaatgatggatgaaatgtgaggcatgccgtccatgcctgcgaaagtggcgccgcctttgaagtcgatgagtacgaaattcaactggtccggggaatggctcaacgccaacgacagtaccagggttcgcagcacttcggatttacccgaaccggtggcgccgacgagcacgccatgcgggcccatgccatgctggcccatctctttgatgtcaaggaacgcggtactggtgtcgtcgaataggccgatcggcacacgcaaacgctccttgcccacacgatatgcccacagtttcgccagatcgatatgacgaatatcgctgatgccaagcagatcaggcaattcgggggatttcttacgattgacggattgtgaggaatcgtctccggtttcgttaacatgcacgctcttcaagcgtttcgctatgcagagcgcctcttccacagtcaattcgtccggttggatttccacaggcttgagtgccgtggaaaacacttcaaccatattgatgtcgcgcttttcgagaacgttcagtccttcctcaaccacggtctgcgaatacagcacacgaagcacatcatcttcctcgagttccccccaatcattcggcatgtcgaacacggtcactccaccgaggccgtcttcagcgaacaatcgggactctcgagacaatacagtccggtcgaatccatcattgatcaccaaaacatgaggagcaatctcattatctccggtacgcctgttgcggctcagcacttcctcgcctatcagcgcatcaacttcgcgcacgttgctcgtcagcataaatccatgaccgttatacgtgccttccaagtatttctcgttcagcacacggttatgaggcagcaaccgtacccattcccactgccccatgcgatcagcggatgccagtacaagcactctgcagcattcagccggatgccaaaccgccgcttgacagatcatggctcttgcgagcgcctgcgtctggctttcgtttccaagcaattccacacgcttgtatttcctcaggtcaatgccgtaaggcatattgtgcaacgttttatgtgcaagcatgaaacgatgcgccgccgatgccgaaaccgggtcgagttgcgcgagtggaggcaattcaggtgattcaagctgcaggcacaatggcacactatgcgtgccgcaacgtaatatcatgaaatcgtcgtctgcgggaacacgttcccagcaacgttccggttcctgggcgatcgccgtcaacgaggatggggatggagcgttccacaatgcggcattgcgttgtttccttcccgcggtgcgcacggttttgcgtatgccagccaaataagtgagatattcacgtcttgccgccgcgaggttcgccatgcgttgcgaacgttggcggaagccgttgaccgccacgaatcccaatgacgacaccatgaacatgccgccggtaagcatgccggtgagtcccgaattggtcatcagcatcatgaccatggcgctggcggtgcccaacaatggcaccaacgatgtgagcagcgtgttgacaccgtcgctgggttcaagctcgggtggtgcctgcaatacgatttttccttttggaggtttgggaccttcgagcctgctgttttgttgttccgcagtaatagccatcaacgcctcctgcttttcgatgtgatgatgctgcagcccatgtctcccaggccgatgcgggatccgacatgcatacgcgttcggacgttcggttcaagttccgtctcttcgccgctttcgtcaagcactcgcgtaccgttggtgctcgctaagtcagtgatccagatttgatcgtccaccaattcgagccgagcatggtttcgtgagaccgtaccagtatggtcaggcacagccaacgcgatgtcccctgtctgctgcggggttggcttgcgcccgagaatcaatgaagaaggcacgctgagaggtcgcttggagccatcttcaaagaagagaaaggtttggggtttctcaggaggtgtcactggcaccggggccgtctgttgttcaaccgttgtccgaaccggatacatcggcttttccgaaggcatgggtacaggagaaacctgttttgccgttggcatgggaaccggtttggacacggccgccactgttttgggaagaggcacgggatgagtgggctgcatccgaggcatgggaaccggaggaatttgcctcgatacgaccggttgttcctccaacgcctcaacacgttgatgaatatcgacgcatcccaaagatgccagtctgtctgcccatccctgatgcaaatcatccttggcgaacaacggtgagcaaatcaccgcaatcagacctatgaccaacgcaagcgtggatccgataagcacgcaatacttcacaagaatccggcccattccggcgggcaaagttcccgccgtgacgtcacgcatgccttccacgcgaaccgtacgcaaaccgaacatcatattccccggagtcagaccgcgtgaaccttctccaatagccagcaccgcaaccgattcgagcatcaccaggaacgtgacgggaatattatgtccgagcaaggccgcaatcacgccgcaaagcaatacgaaaccgcaatcgacgaatgcggccgcacattgttttccggctcctgccggacgacatctcattacggaattcgaatccgacatcacaatccccttatgtactgcaacgtgccagctgcgaagaaagccgccacaggcgtgaccatcatggacaggaagcacaacgcatcgccggcgcgagacaatacaagcgaatgaaaaccgcctttttgcacaggaatggcatataccagcagaacgccaatcaggccaatcgcgcatacgccgaacagcctcatgttttcggttgtcatgaagccccaggccctcacgcaggccatagccatcaccatcaccgcagacaaacgcatgcagtaccgttcgaaaggtctgcccgaccggcgcggcttaagggtgagaaagagaaacagggccgcggtaagcacgagaaagccgacagcatcatacatccgatggaaatcgcagaatgcgaccaatgccgcgtacggcaataccagcagcgccaagcaaagcacgaaaccggtcgcatatcgggcctgaaacgtctgcatatcttcacgaatatcaacttgggtcaatacacgggcctcttcgggaatgccaccgcgcaccgtccaacgacgtgtcatgtaggcacgccattgcacaagataacggtccggcacatgcaccacgatgttcggcagcatttgcagacagcatatggcagcggcaagcaccaaaccggcaagcagccgtacgtccaacgaacacatcagcgttcccgtactggcgagcagcaacagcaacgatacggcaaagcatgcggatatcacgccattaagcaccggctgatcaatgcaaaccgtcattaacgacatattgaggcatacgcaagaagaagataggaaaaccgccgccgcgatcggctgagcgcaaggttcaatgcagctcgccgccacaccggcacacaccgacagcagcacagcgcaagccatggcaaccagcgcaacggtttgctcgtgtgagcgtatgctcaccacgcataaccgatcacaaaacagcatcagcaatatgaggcttgtcacaagcagcacaggcaatcctcgcatccgctcgtcgccaccgggaagcaacacgctttcggacagcaccgtaacggcaataccagcaaaaagcactgcgcagacgagcgatacaatgcatatcgcctgtaagtcagctggcttggtttctttgtgccgcatattggctttcccactcacgcagacgagtcattcctttatcgagcgcaacacgagcctgggccgcttcattatcttcgtcgtccgcatcctccacgctatctcgcacataactcatattctgcgcgaggtaaccacgtacttcacgcgcttccggagacttgtcaatgccagcaaggatgtcttcctcacaggttttccccatgtcgatacgctgctgcaatacttgccaagcgcgcccacattcacctttacgccgcttattttcaagttctttcgttttttcagctattttttcatctatttgaactttctctttttcgaatttcgcccgctgcttgtcaagccgggcagacagtgaatccatttggttcatgaaagcttcgaattccgctgatgtcattccacttctcttttcttcgcacataaaattgtcgtaccgaggtcatcgtccgtttcgcaatgcaagtcataacgatgcggttggaaggacatgacgattatcttccatcggacgatccaccggatgccccggcaaacgctacgtcattcgacgtactgccagttccaccgttcgacatgcctccgccaaaaacgctcagcatgccctctgtttttacggaaagccgttgcataaccatgaggcatacacacaatccgttaagggcttcatacagattgttaagatattccacgatatcggatgcccattgaatcgcctgggtgacttccgcagcgacagtgaccgtagcgagcaccggaccggctccaggaataatcagctcacccgcaataagcttcaacagcgaaatgatttcactcaacgtgtcgaatatcagattcaatgttttttccgcattgtccgccaaagcgttcaacgcctgggccatttccgaacatggctccggagcttccacaagcgcgtcggccaccgcctcattgcgaacaacatatatgtccgcggcctgcccagaccacactgtctcgtcgagactattggaaatttccaataacgccgtctgcacttcaggcagtgtttcagccagcgactgccattttcccgcagtatcgcgaagctcatcccaatcgccgaagaatggtttcctgacccactcatctataggactgacaccaaacaatgccttgcaaatgaagtcaacacctgagatggcaatgcgaagcgtagtaatcttgctatccagcgttttcgccaaatcatgcgcactttgacgagtcaaatccccttccaaagattctgtgaacctttttgacgcatcctcgaacttctggcttttccttccgatgtctttcttatcaagtcctgttttttccaggattctcccaaccactttgtcggctgacgtgtagccaaatttctgcccggaaaggagggctgaggcagcctttcccactttcctactgtcataggcctcgccgactttttgataaaacttcaagtcgcgtttaatgtcgcttaaatcgtctggaacatcgatggtaatcgggccgaaatgcaagtcgttggcagagccatcatcttcttttgcagccatactcttccccttgtgtatagtttgaatgtgatatttacccggttacggccggatatgctttgcacagcatcctgttttattgaatcgtcgtgcgttcaggtagctgaatggtttctctgtcttcgtacaaggcacgaagctcatccgccgttcttcccagaggatctttagctgcgatgctttgccaggcttcatcctcggcttgcttacgcatggcttcccttgccgcttcggaatctccgacgcggacggcgacatcgtaatcgccgtcattgtcgtagtcgagggcaacgtaccgcgaatcttcatcctcatatacgctgaaacgggcattcgcgcctgaatcggagttcatggacacgtcgtccacgccatcgttgtccacatccagatcaaacgaagcggatcctgttttgcttgcatcagaaggcatcggaatggtggaattgtcacgctttgtcagagtaacggaaccatccgccccaatcacggcatgcgtattgccatcagtgagattcagagagtagtcgtctttggcgtttccatccacatccaatccaatcgtggttggtcttgttggaagtggaacctcattgaaaatcggataagtgttcgattccgccgcatcacgcgcaccatcagatgttgtttttttctgatcatggccgaattcttgcgatcccgacgccattgcaccagaacctgtcgcagatgatgccggacttcctgccgcttcggaaccaccgtcggatcgaccattaaactgatccactggctgatattgcttgctttgcaaggaatcagctcttgagccaccaccattgccaaagctgccgccatagccggaattgccgcctattccgccatttccctcggaccgtgcgttatgaggatccgaggaatccaacttgtcatccacttgctgaagcagttgcagaatcttcttcagcgcctcaagtatctcctcttcagtggtggtggaatcttctacggtcccctgtatggccgaagcaatcaatttcagcattgtttcaacgttggccaagtattcttgcgtagactgcttcgccgcttcatacgccggttccaggcatttgagaatcagcccgaaattcggggttcccgcagacacaaactgcgcttttgccatagcgaactgttgtgcggcctgttcatagtttttcgccgacgtttccagatcggacgggtcaacgcatatgcatgaggaagacactgccttcgctcctttcctgttcaacaagagaacgttttgttcaacgacgtgcggtcatgcgcatagcgcattccgcccatgcctcattcgccgggacgcctgcggtgacctgccatggccgccaacggcttgggctggaattcttcttcctcttcaatggtcggagcaatgtagcccaaggagttgcgcctcttatccttgctctgagacgcaccgccacgccccatacccatcattcccggagtgtttgcacgagatgacgccgcagcttcggcacgcgcaatttctcccttgcgcaatcccgcagccataccggttgcacctttgatcgacgaggatgcaatggacgccttgaccggattgttcgcataatacgaaccgacgccggagccagaaaccgctgccatggaagcttcagacagtgctccggaacttgaaccagctccacctgcgagcttggatacggctaacgctccaccggcaccgatgccagccagcgccagccgccaccgcagtacgcccgattccggaacccgatcccgcagagcctccggacatgccgccatgggcggaaccggaaccgttatagctcatatcgctatccacggccatgtggttccgatacacgtagcggcctgtcgccggatcgtatacgtataggttacggtcaagccaacgtccgcttgccggatcatacacgtatttgcttgtgtcgatccattcaccggtgttcgggtcaaacatccgaccattatggctattgttattgtcaccgcccgtatcggcagcgtccgtagggttgttacgtggaggaagaggcggcgtagggctcacgttggggcgagaaattgaggccgaacctgatttgggggtattggagaatttcgatgatgcgacagccgcaccgccagcggccgcgaggccagcgctacctgctacggcagctgagattccagtgtcgccaaacgaggcgggatacacatcttcgatttccgaagaattgttttcaccatcctgtgctggccacaggccgttgatgtcgacgactggagcttcattaactctgcgcctagggtagttttccttcctttctaattcaatccgttcaaattctgcttcagcctttttttctcgctcattagcaagcatatttgaaattatgttaacgcccgcttcgccgattatcccggttaatgttcccaatccaggaacgataatattcaatggcgtctcagcagacttaatggcttgttcaatatcgctagtcagtctagtgccgggcagctccacattccttgcatcgtcgatcgcctgattgcatgcgtcaacaatccgaaatagatcagacaaggctgttggtatgttcgcttcctcaatgcctttggaaatttctcgaacgcattccaaagctaccttttgggtttcgcccccaaaaacgtagccttccgcaagttcctttttcatggttttgagtttcgcggcggcatcatctatgactcgttcaaaccgtttgaaatcgtcaaattcctcaatagaccacttggcggtattggcaatgtccgacagtcttgcctcgtaatatccttgagctgtactcattggggttcctttccttcacccgcagtatttttcatttcgcgccgcatcttcaccgtctgggtggcaacggcggctgagaagcaggccgcgaagcctgttgcagatctggttttggagcctgcgttggagggtacgtgtacccggccggcgcaccggcgttcggatacgagccagcgacgggaacggaccgcgccgcgggcccaacatacgatggcgccacaccatacgggaccggcggaacaccagacccaccgacggttccaaccggcacggcacgccccgcatccctcgcacgccgcatcctgcggaccagcaccaccgccagaaccacgccagccaacaccagcacgccggcacccgccaacaccacgggaaccacccacgacggcaccacggacgaacccgaagcatccgacgccatatccccggcgaccttcccatcctcctcatcggccgtggccgtcgcggaatacttcatgcaatcgctcccgccgtccgcacggcacgactccaccttctcccacgcggcctgctgacgctgcagctcacgacccaccaaagccgtatcgggcgtgtacatgaccgtgtcgccatcaggcgagaactcccccgtatccgcaaccccatgctcgcccagcggggacggatactcgtacatgcccttggtctcctcatgctccccgctcgtcttcacggcccactccagaagcggattcacatcgggatactgggccggatcgaccgacagcaacttgcctggatccacgatcccgaaaccacgcttgtgctccggatccagtttcggcccgcccgacgcgttccccttcgtgttgcgaatcagggactgcaggatctggttgcccgtcgcatccggccacttctgcatcacgagcgcgagatacgcgctcagattcgccgccgcggtcgacgtgccgccgccagtcaaatccatctcacgcgaatccgtgctccggtaggacggcacgcccacgcccggactcagcaccgacacgttcccgtccatcacatccgacgactcctgcagattccccgccgaatccaccgcgttcaccgtcacctcaccggggaaatagttgttcatccccggctcgccgaccaggtcgtacatgccggccctgacagagttgtccctcgccgagaccaccaccacgccgtgacgcagcgcgtacaggatgtcgtcacgcaccccgctaggatcgccgatgtcatccacgtacgacatgttgatgatcctcgcgccggaactcaccgcgtcacggatgctcggcttgtccaagtcaacacccttaccggcatcatccacacatatatccgctccccctcccaatcgtccttcacgttggtaaaagaccatgtaggcggtcacggaggcgtcgggcgcgatgccttggatgcccgcgccgccgtcccatccattgccattgcccacgatcaacgacaccacactcgtaccatgggttatcacgaacccgctggacgaatcaagagtgggatcgtccgcggacgtggtctgcgacggatcggacttcctatgacacggctggttgctctcggtcatgagcttgtacgacacgtccgcgcccgccagcgcgggataatcagacacaatcggatcgtcaagcaccgcgaccttcacgcccttgcccgtgatcccctgggcccacgcgtcacgcacgcccataccatcgacacgccaatccacaccatccgaagccaccgccgacggcacacacaaccccacacaagccaacaccgccgccaacgccgacagcacaccgcgcacctttcgcacatgcgatgcacacaaatctcgcgtcatcaataaccccttctcgtatggaaataacaaacgcaacacgtcacttaatcagcaaattcaaagagtcttcggcggtagcggaggaatcgaaagcacattcaccacactatccactaatgacagcagcggctcaaacgcctcatcgctctcgttcttcttagaagtctcgtgtatgtcggatgcgttaccctttgtttttccaacaacaggtgcagcctcctgaactgttacctcagccttattgatagaagccacctgctgttcttcggcctgttcaaatattttcgcagcgctgcaaacgcgctgcgagaaaccactcatggcttcgcctatattcgctccagttccctgtagcagctgggtatacgcggaagcgcttctcatgaattcctcgccaaaagcagtatcgcggctatacgcttcctggccgcaacgccctgcagattcagaaaccgactcgccatatgaatccatgtcattcgctatcgcacgcgcattttcaacatccgctttgatttcaactaccatgcccgatccgctccttgtcaacacccatattcccaaccggaaagattccgtgtgcgccccacacctttcgtggaacacacacggaatcacacgacatcagaaacgacccgccgaacgcgcgtcagactccacgtactgctgtgcgatctgtgaggtggcttgggaaatctggccaagaatctgattcatttcctgcaacttgccatcccaattgcgttgcgcctgatgatatgcctcacgagcggaaccgtcccactgaccaatcaaagcgctcacctggctattgaggttttcaagctcctgagcaatgctcttggcatcggcagcgatatcgctcgccaaaacatccacctgctccggacgaaccgaaaaagaacttaccataatatgttttctcctttagctttctagttcaattcgatgatgtcagccaagcaacgcctgcaacttggacgtacgggactggttgtcttcctcattcgcagcctgatccttggctgtaccccgtaggttatccgaaagatcaatgagaatattgttcaaggacgtggccttctcctgccaactggacatcagcgcgttgaacgacacggccgcgtcaccactccagaaagagcccagctccgccatcttcgcttcgatatctttgattcggttctcgatacccgagcgcgcattgtcgaccgcagtggcacccttttcaattgccccttcttcggctctgatctgttccgccatcttgtttccttccttggaggcattctttcttagggaagccacaatgagacacgactcccccaaggaataacaataacagcaataacaaattcagtaaaatttaagttcattaagtatccaaaacccgagatgaactcacgtcaatcgtttgacgttaacttaaaagtcacttaggcatagcaattttactgaaaattaagcaattttttcagaaacaaatgacaatcactgcaaaaatgcaatcatttttctcaatgccttatagttgtattgtttatagacacgatacagcgccttacggcattctctaaggaagagcatgaacatctccccgccaccgctcccgcacggaagacaaaataccccatcttcaccccccatcaatacgacagatacactccaaatcaccgtctcctataaaacgcgcacaatcgcgctgcgggtgaacgacggccccatcatcgccgatcttctaccagacatagcccgacgactcggcatactcgatccgtcgatcgtgtacggagggtacaggctgctcaccagcgacggcgatccactctcccccgcaaagactcttcgcgaacaacacgttccaaaccactccacgctcacgcttgagcccggagcatcatcagacaccgacatcatttacgatgacgtcgtagaggcagtaggcgccagcgtacagcacgtataccgcccttggaccagcgaccacaccacattcacgtcacttgtcatcggcctcggcatgcttgttatcagcgccggatggatcgcgcttttccccgcatccatatgggcatcggttctcgcatttggattcagcgcaatacttctagcgctcacagccgcattatgcggcaaaaacctgctcgtgcaatcaaccgcaatcggactcatcgccagcatttttactgcgattggcggatatcaactcgtcaacctgctcgcaggcaaacagccactgcatgccctgccacttcttggagcgagcctgggactcgccgccgcaggcatactcatgagtctcgccgcatccaaaacacgcccatacagttatattcccattttgataggtgccatctgcgccataccaagcgtcctcagcacactcatgccgcagcagatggggcatatctggatcctcacatcagccgtaaccgcactcaccgcgagcgccctgccttggatgtgtctgtcttttgcaagaatcagcgtagacagtccgcatagcgaatcggaaatcttcgcgcttcctaacgacattgactaccaagacatcaaacgtagatatatagcaggctcgaccatgctcttcatcggacgaatctgcgtcgccgcgctgctgctcatagcggcaccgctcctcaacacgttggacacgccactcgggtcagcattatgcctcgccgcattcctcggcatgctgctcgattccaggcagatctatacgttccgcgaaatgtgcgtaaccgtaggtgccgcaggcataggaatcatcgtgaccggatcgctcagcgtgcaaacgcatcaggaattcagcattccgctgattctactcatgctcgcatgcgccttcgcgaccatactgttcacctatgtcttacgcaagcatactctattcgccacacgcgtggcggacgccgcggaaaccatatgcatcatgcttattttgccgctcgcatacctggcaatcacgctgtaaggacgctcatggccaacaagaaagaccttgccgaagctcaaagctactcgcgccgcagacttgtcaccgctttcagcagcggcattccagacggcgtggaactcactccgaagaaaaaccagactcccgtaatagtgggtgtagggcttaccgtcatagcaatacttgtcagccttttctacggcatggtaagtccatcattgccagacggttgggagaacaacaagctcatcgtcgcaaaaaactcagcggcacgatatgtcagttcaaatggaacgttgcaccccgtcatcaatgccatcagcgcacgactgctcattccgtcatccgacttcaaagtgctcacggtagccgacgaccagctcaaaaacattcccatcggttccaccataggcatcctcggcgcgccagattcgctaccggaagaaaacaatctcatcgcaggatccatcaatagctgcgtctccgacagcaacatcacaaccacgctcagcaacgcttcgtctcaagtcacagacacggcaacggcaattgtcgccaatgtggacggcatcagctacctcgtcaacggaagtcaccgataccagcttcctcaggaagcgaccttacgagacgcgttcctcagagcattcggcattcccgaaaccgcttccaccgacgcaaccgcacaatggatcaacctgttcgagcaaggaagcccgatcgaacaaatctcggtggacggagcaggcaacagcattaccgtccatggcgttgaagcgctggtcggcagcgtagtcatgcagcaaggcgatgccaagaaaaccaaatatgtggttcgttccgatggatcgctttccccactcaccgattttacctacggcctgtacatcacgggaaaaacggatgaattcacacagccgaacgttctcagcgcggccgacttccaattcttctcaaactccaccgaatccgtaattccggaagattggccctccgaagagctatcggcaacatccggaaacgtctccgcgtgcgcaatctacaatttggaaacggcaggaaggaaaaaagccgacactcatgtaaatttagcagtcaaacaaaacaactcagcacatagcggcacatccaaaacaaacccgtcaagcaataccagttcaacagtgaagctcaaaggcggcaccggagcattactgcaggcctccatcggcacatccgacaaaggctacattttcgccgtggattccacaggaaccgcgtatcctattgcgaatgccaacaaagaaaccctcaaacggcttggatacgccaaaaacgacgtgcaagccattccccgcgcatggatagacctatttagccaaggcgtcgaactatcagcccaagcagcaggatccgctccaggaagcaaccaatccagcgcatcgcaaacaaacgatggcggcaatgcgtcgtcatcaaccgccgatacaaccactgacgcagccactaacgcaacggatgatcctggaacaggcgccgcatcggcagacgcgcaagcacaatgccaagccggcgtcgaaaactacatcaatgacactccttggaccaacacgctcttcgacttcgaaacactgcaccgtcaatccacgggcaaaggcgtaaccgtggcggtaatcgactccggggtagatgcggataatccacatttggcaaacgccgtaacacctggggtaagtcatatttcaggagacgccaccaacggcatgaccgacatatactcccacggaaccatcatcgcaggaatcatcgcggcgcgtgcagtagacgggtcgtccgtagaaggattcgccccagacgcgaccatactgccgatccgcatattcgaatcgctccacgaagaaaacggaaagcaaaccggcggaccaagcatggaagacgtcagcaaagcggtaatcgaagccgtggaccaccatgcgcaaatcatcaatatttcattaagcgacatcaccgatcttcctcaaatgaggcgagccgtggattacgcagaatcacatggcagtctcatcatctccagcgcaggaaaccggctcacgtcagccagcaccaaggacggacgacgattccccgcagcctacagccaagtcgtaggagtcaccgccgtggatacggatttgaatatcaccgacgattccgtccacggcacccaagtggacatcgcggcccccggcgcatacgttgcctcaaccgtccccggcggcgtggactgcctttacgccaccgacgcagcctcaacaagcttcgcgaccgcatatgtaagcggcgcggcagccctcatcgcctcacaatatccgaatgaaacacccgcacaatggcggcaacgactgctcgtttcagcgaatcgaccaaattccgaccagcgagacaacaacattggatggggactggtggacccacaaaccgcgctgaacatagcgctttccgacagtcttcgaggcccgacttcaacaggtggcatgcacgcccagaataatgccgaaacgtccatgaaaccgcttgtattgcacaaaatccaagatcctgatacgaatttcaaacgattcgtggaagctgccagtatcgccgtgccttgcgcgtatatggtggcatggcttgtacggaccgcgcgaaagaccgcgcgaaagaacacttcgcaaagtatttcaacaaatgagcatagttttaactagaataattagatattttcagatagtcatttgaaattgatgccgatctgaacacttattcatagagaaacgaacggcatccgccttatgcagtccctcgcgaagtaattactcgcccataggaaaagaagatcatattagcgtcccatggcgctgacgcccattcagctcgttttgccgccgtacgacagtccgccggaatacacccacatgccgtagtgtgcggcacgcggatcgttctccaacggaaaccgcgggtcgcactggtccggccagatgatgtcgcccatgcagggtgccgggatttcccgctgcagctgctcgtagtagacgcggtaggcgcggaacagctccagctccgtgtacggctccaaggcgcagtgcatggcgacatgcggttcgcggcccgcttgcagcattcggttgatccacgcgtacaggtaccccttgtagacgaagaatcccggcttgtgggggaacgtgttcatcaggtcgagcatacgtttcgaacatgaaccgttacgcaggtcggcgtatggcgtccatgccagctcgccgacgctgcatgcggcgtattggaacaggttcaggtcaacggtcaacgggaacggggcccttacggcgacccctcttagaccgaatcgtgaaatcatcggatccaccgatcggaaacgataccgtcccccatcggcgaactcgtcatagtacagaggctcgctgtccagaacgacgccatcccagccgtcgcgatgatgggcggaacgacagtagcagtgtttttcgtacagtccaccggtccagccgcgtatcggctcgttccagccgcccatgcacatgtagaccagccatctaggcaggggataataggagcccgtcgagccgacatcctccacccagccacgctcctcaagcgaatacgggtcgtccacctgacgccagccgaaaaaaccgtctcgttccgataccagagacatatttggctcccatctgcaaattagtgagaatggattcggcctgaccgttatggaaaccagcttttgtttgggatggcttgtttggaggcgaaccagcccggactggcagcgggataagccgcgccgccggtccggtcttgtaaggcaatatcacaagagtgatatcagatgcagttatcagaagtagctactaagaatagctaccggaagtggcatttagaaacggcatcagagggacgcgttgaaatcgcgcaccttgagcgtgcggtgcgacgattcgacattgccgcgcacaatacgctgcaacgcgttgtcggcgtccgcatgcgaagccagccaagcatcaccgagatccaccagcgtggccggatcggcatagctcggatacaggccttccagcagggcctcagccatgtggaaggtcttgttctgccaaatccagtcggcaacctcgaaatacttggccgcatacggttcagccaagtcgacgcgcggagtggaggcgaagcctcgagccacggattcaagctgcatgttggtcagctcatcgttgtgcaaagcctcgttccaagcccattccttggcctccgcagtgcctgcgaccgcgcgagcgcccaatgcgaactcacggttctcagtggtttcacgtttggcaagctccgcgtcgatatcgctctggctgatggcgttgattgcgctcagcgcgttgatgatggtccagcggaagttgttgtcgatttccaagccgtcaagcttcacggaaccatcgagcagacccttcgcattcgcttcgaaagcggcgtcgcccggctcaccataacccaagtaggcggtgatcagctggaactgctcgtcggaaccggcttcggcggcctgagacagcttgaacagttcggcagccacatgctccaccacttcggcacggtcggccggagcggtgtaatgccatgcggtggtgctgatctgcgccagagcgtaacggaacgtggtggactcatgttccgtggcgagcgctgcaagcgaggtttcgatgaaccgctttgccggcaattcgccgtcgcgggtcatatcccaaaatgcaagccaaatcacggaacgagccaacgcatcgtcgaaacgatacaggttctccgcagcgaacttgaggctcttctcatcgaaacgcagcttcgtgtatgtcagatcgtcgtcatttaccaaaatcaaagccggacgtgccttgccggcagctgcttcgacaatcgtcagctcgccgtcaacatcaagttcgaactgttcggtacgcacgatcttgccggtttccggatcctcattgtagaagccgacagccagacgatgcgcgcgcagcaccggatgctcagccgaagcggactgacgcaacgcaagctggcggatcgtaccatcctcgttttcctcaacttcggtggcgatggtgttgatgccggattgttcaagccactgggcgctccacgccttgagatcgcggccggacgtcaactcgagttcagccagcagatcggcgagcgtggcgttcgcatacgcatgcttgttcagataattgttgatgcccttgaagaacttctcacgacccacatagaacacgagctgcttcaacacggaagcgcccttggcgtaggtgatgccgtcgaagttgacgtacgtgtcgttcagatcgttgatcggagcgacgatcgggtgggtggtgctcagctggtcctgacgaagcgcccagctcttctcgccggagctgaatgtggcccaagcgtccctccattccgtggcttcggcagtggcgagagtggacgtgaactcggcgaaggattcgttgagccacaggtcgttccaccacttcatggtcacgtagtcgccgaaccacatgtgtgccagctcgtgcagcacggtgaccacgcgacgctcggcatacgcgtcggtgaccttcgattcgaacacgtactggtcacggatggtgaccatgccgatgttctccatagcgccggcgttgtattccggcacgtaaatctggtcgtacttggcgtacgggtacggcacgccccaagtcttcgcatagaaggcgaaacccttcttggtgatgtcgaacaggtagtcgacatccttggcgaacgcttcggcgagcgcctgacggcagtacatggccatcggcacggtgcgaccgtcttcgttggcgtattcggtatgccattcggcgtacggtcctgcgcagatggcggtgaggtaggagctcatggtcggcgtggattcgaacacccacagcttggtggtttcggcttcgtgcgtgccgagcgtgccctcttcggtaacggtttcattgtcggtcacggatgcggcaggcatgttggaggtgacgatccacgacttggctgcaagcacggagaaatcgaacacggccttgatgtcgggctggtcgaacacggcatacacgcggcgggcatccggcacttcgaactgggagtacaggtagatgttgccgtcggaagggtcgacgctacggtgcaggccttcaccggtgttggaatactggcacagtgccttgacggtcacttcgttgtgcgcttcgaggttcttcagttcgatacggctgtcggcgaacgcttcggccggatcgagagttgcgccgttgagcacgatttcgctcacttcggtggcgatcaggtcaaggaagctggtagctcccggctcagcgtcgaacgtgatggtggtttcggaaccgaaattcttggctccacgggtcagatcaagtttgaccgtgtaatgaaccggtgctgcgataacgcttttgcgttcttccgcttcgattcgggtgagatttgctcctggcatgtcactccttatttgtgttgagattcctatttattgaataggagacggcgcaaccggttgtgccggttacgccgtccttcttttgattatgtaatcaacaattattgacgatctgtcgatatttcaatattattccaatattgatttcgctggaatcggcgatattgcgaaaaatattgactatctgtcgattcatcattgcgctgcgttcaatcccatcgcttcgtcaacatcctgtgcgatatcggcaacgaccggaacgatcatcggcttgcgatgcagctgacgtgcgacccagctacccaacgtacgacgcatgatctgctgcaacttgtatgtatcgtgcgtgccagccatcatcgcatcctgcaattgctcgacgatctgatgacgaaccttgtcgaattcgctttcgtcttcggccaccgcgttgagatagatcttcggacctgcgacaacgtcagccgtttccgtatcgacgacgacgaagctcgacacgaaaccttccgtgccaagaatacgacgcttctcaagctcgtcctcggtaagttcgccaacggaatcgccatcgacgtacacgtagccgcatggcacggaaccgacaacagcagcttggccgtggtacaaatcgaccacatcgccgtcttcggcaagcaccacattctgcggatcgacgcccgtcttgaccgcgatcatgccgttggccaccaagtgacggttctcgccgtggatcggcatggcgcacttcggcttgacgatgttgtacatgtacagcagttcgccctcattgcagtggccggacacatgcacggcggcattgtctcgattgaccacacgagcgccaagctgcaccagcttgttgatgatcttgtacacgccatgctcgttgcccggaatcagggagctcgcaagaatgacagtgtcgaattcgttgatggtgatgtcgcgatgattgccgtcggcgatacggccaagcgcggccatcggctcgccttgggaaccggtgcacatgtagacaagcttgtcgtcctgcacatcatgggccttcttcaggtcgatgaccgtgtcttccggaagtctcaagtagcccaaatccgcagcgatggacatgttgcgaaccatggaacggcccacgaacaccaccttgcgaccgtacttgtgggcggcgtcgacaacctgctgcacacggtgcacatggctggagaagctggccacgatgatcttgcgcgtggcctgggcgaacgcctgatccagcgccgggccaatggtggtttccggcttgacgaagcctggaacctcagcgttggtggaatccatcatcagcagatccacgcccttttcgccgagcttgccgaactccaccaaatcggtgatgcgatggtcaagaggcagctggtcaagcttgatatcgccggtatcgatcaggcttccggccggagtctgcacgaacacagccagagcgtccggaatggaatgcgtgacgttcacgaactcaagattgaacggaccgaccttcagcttgtcacgacccttgacctcaaccagtcgcggattgatacgatgctccttgcacttggcttcaacgaaagccaacgtgagcttggaaccaatcaacggaatatcaggacgaagcttcagcaggtacggcacgccgccgatatgatcctcatggccgtgggtaagcaccaaagcttcgaccttgtcgagacgatccttgatgtagtggaagtcaggcagaatcagatcaacacccggctgctcctcttcggggaagagcacaccgcagtcgatgagcagcaggtggccgttgtattcgaccacgttcatattacggccgatttcgcccaggccgccaagcggcacgatacgcatggagcccttacgatacttcggcggagcgatcaacacatcatcctgctgaggtgcggtggtctgcggagcaggacgggaattgcgacggttgccagtagaggagctggctgcactggagttcttggaacctctggagttcctcgtgttttcgttcttcgtgttctttgcggccttcacgtttttcgtgctcttcgagcccttggaggagccgctgccgttgccgcgagaaccgccacgaacggaaccggacgcatcgcccgcacgattgccacggccaccgccacggctagaagacttcgccttcttggaagtcgtttcagccttgctgaccttctcagagctcacagacttcacggatttcacatccgcggtctgagtgttttcagtgtgcttggcagctttgctgccgcgcttgtgcgtagttactgttttggtttcttctatagccatttcctagttggatttctattactaattgtctccgcctgtgcggaaacgaggaattcagttagtctgccgtattgcggcaaacccagcaaacttgtgatcgcaacaatgcccggaatcagcgcaatcgccgacaatcaagcgctttgcaatcacaagtttcgcaatcacaagttcttcaattacagcaagccggaagcgcgcatgccatcttccgcgcgcttgatctcagcctcgcccggaccgacgttcggcagacgcatcgtcgtggagtcgagaatgccacgcaccttcagcgaagccttggccataacagcctggaaaccgttgccgttcattgcttcgaccagtggagcaagctgcacggcaatgcgctgagccccatgaatgtcaccgcggtcgaatgcggcagccaaatcgcgcatcggaccggaagcagcatgtgcgatcacggaaataatgccgactgcaccaaccgaaaggaacggcaggaacagaccgtcatcgcccgaataccaagtcaaaccggtttccatacgcttacgcacggcacccgcgatatctccagtggcgtccttcaccgccttgacgtgaccaagctcagccaaacgacggtaggtttccaactgaatgtgcaaaccggtgcggccaggcacatcgtaaacgataatcggcttgtccgcggaatcattgaccgccttgtagtgacggaacacgccttcctgcgacgggcgcgaatagtacggagcgaccacaagcaccgcatcggcgcccgcctcctgagtctgctccaccatgcgcacggtgtgggcggtatcgttggaacccgcaccggagataacgggcacgctcaccacatccttgacggcctgaaccagctcgaccttctcctccatgtgggtggtgggagactcgcccgtggtgccattgaccacaaggccatcggcgccatcggcaacaagctgcttcgcaagcttctgcgcggcctcgaaatcaacggaaccatcggccttcatgggggtgaccatggccggaagaacacgtccgaaaggagcaggatcaagaagatgcatagtaccgtcagtcatagtgccaacggtacttcccgccacggacgccgaagagcccgagttcgtgaccatatcgcaatatgaatgccagtcgtccaagtttttcaagcccaagcccctcaccgtccagattcctccagccagcggaagaatctgggtacttaactacataaccaaatggattcaagcaaaatgacctcacgattccattttcagacacaaaatcaaaatcgtgaggtcacaggcaaagccaaagccgactctaaaaaccaaggctggcccaaaaacttaaatcaacactcaagcgaggtattgggtggggttttgctcgaacttggcggcacagccagggttgcagaagtagtaggtggtgccgttgtattcgcgggttgcggcggcagtggccggatccacgctcatgccgcagaccggatctttggcgggcgcgctctgattgtcgttggcagcatggccgccacagcaagagtgcatgccttccatactctcgtgggcgttttccttcttggctttgtgatcactgaacagtcccatgatgaatcctttctgactgtggttgttgtgattattatcgttcgggttcggctgacgaacctgatacgtcttacgaagcgccttgtctggatcgaacaggcgcagtcggctcgcgttcgtcaccacgcatagcgacgagaatgccatggccgcgcccgcgatcatcggattaagcatcatgccggtgaacgggtacagtacgcccgccgcaatggaaatgccgacgctgttatagccgagcgcaaatccaagattttgcgcgatattgcgcatggtggcgcgggtcaagtcgagcgcatgcaccaaacccatcagcgagccattcatcaatgtcacgtctgcggattggatcgccacatcagtgccggtaccgatggcgaatcccacattcgcgcgggcaagcgccggagcatcgttgatgccatcgccaaccattgccaccgtatagccttgcgcctgcagtttcgcgatttcatccgccttgttttccgggcgcactcccgcgatcacattgccaacgccaacttgatcggccacggcacgcgccgtcgtttcattatctccagtgagcatcaccacgttgacgccacgcgatttgagggacgcgatagcctgctgcgaatcggctttcaccgtatccgcaacggccacgattcccgcaagctcaccgtcgattgctgcgagcatcggcgttttcccttccgccgacagccgttccatagttgcgataatgtcgtcaagatcctcatcgccgacgctcggcatgcccacgtcaagatcgtcgatcagatcggtattgccgaccgcaacgttgtacattgcggtttcgggagaagatatggatgattcgaaggtcacggaagatgcagaggattcgtcagctgcaacagtcggattatttacagatattaacggcaacgcgactcgcgcagtgacgccccgaccggaaatcgcacggaattgcgtggcctcgcctaacgtaagatgctcctcttgcgcgcccgcaacgatcgctgcggcaagaggatgttcggaatcctgttcggcactggctgtgatcgccagcaaagcatccggcattttgcgccattttccaagcggaagcacgtcggtcaacgacggtttaccagcggtgatcgtacctgttttgtcaagtacgacggcattgattttgccgcaggtttccaatgcttcggcgcaacggatcagcacgcccatctgcgcggcgcgaccggtcgaaaccgttacggaaagcggtgtggcaagacccaacgcgcacgggcatgcaatcagcaacaccgaaaccgcagccaccaacgcatgcaccacgcgcggttccggtccaaacgcaaaccatagcgcgcacgaccacacggcaatcagcaccacaatcggcacgaaaatacctgaaatcttatccgccatgcgctgcaccggcgctttcgaactttgcgcggattgcaccaatccgataatctgtgcgagcaccgtgtctttgccgactttcgtggcacgataccgcagcgatccagtgccattgatggtggcgccggtcacggaactgccggcctgcttcaccacaggcatggattcgccggtaatcatggattcgtcaacagccgacgaaccagcaataaccacaccgtcaacaggaagttgttcgccggggcgaatcgcaatgatatctccgaccgccacctgctcgaccggaatttcctcttcaatttcacctcgtaccacgcgagcgtttttcggctgcaatcccgccaacgcgcgcatggcctctccagtgccgacacgagcgcgcgcttcaagcaattggccgaccagcatcagcgtaataaccacaccaaccgcttcaaaatacggttcgcgagcattctcaggcagaatctgcggaataaacgtgaccacgcacgagtaggcaaacgcacatacggtacccagactgaccagcgcattcatttccggcgaacggtgaataatcgccgcgaaaccactgcggaaaatcggtaatgcggcatagcacatcaccagcagcatcagtacaaattgcacccaattcggcatcggatacagcatcaacatcgtcgaaccgaatactggaatcgtaacgacggctgacacaataagacgcgcaatcaacgttcgcatcttgcgagattcggaagaatcgtttgacgaatcagaagaaatattggaagattcagcagattcatacgatttttcagcaacaacgcttggctgcgattgcatatgaacgtgagattcagcaatattcgagttttcttccgattccgaatgttcttcctgcattgcggcatgatgttttcctggcaccacccgtaatgtgccatgcagcatgttcatgccgcatgcgaaaccgtactcccccggttcgttaggatgaagagtcaatgtcgtcgtacgaaaagcaggcaatgccaggtcgatgccaaaatcggagaacaccacatgcgacgagcattcgccatcttcttttcgatcgaagatcaatcgcaatggcaaaccggcctcagcttcgatgattgccggactatacccgcctttgacttcgacgaccgcctcttgcacgccgttgtcgacgcgggcgcggaacgctttgcgcggcgcgaaaaagaaccacaaaactgctaccgtcacagccaatgcgacgatgatggcgatcagagcctgcatgttttcaccggtttccatgttgcattcgttttcgattcggacagtcacactatataccccggtagggtatattagcaagaaataggagtacatttatgcggtagatatatgcgcaaccagcgaaagtcggcggaccgaaacgccgaattgacgcgaaccacgcacacgcagagaggcgaggaacatggcggagcaaatgcaaaacgatcaacattacgcaatcacgcagcatgggtatgccgacgatcaaaagaaaatcatcacacggctcaaccgcatcgaaggacaagtgcgaggaattcgccaaatgacggaaaaaggcgaatattgcatcgatattctgacacagatttcagcggtgaacagcgctctcaaatcggtggcgttgctgctggtcgacgaccatctcagtcactgcgtcaagcaggccgcagcacagggaggcccggtttccgacgaaaaaatcgccgaagcgagcgcagccatcgcacgacttgtcaaatcatgagaaaacgaatcataggaaaagaaatgccggttccgacgattcaatacaattgatgcacgttttggaaatataaaaacgagcgcccaccatgcggtggaacgcccgaatagggaacaacaggccgagtctacccgaccttgccaacctgtttgccgaatcgcggattcaccgatttacaggtcgaggaagttgtcgaggccgacggtcatgcctgggtatgcgccggtggaaaccttgcgcacggccagcagcacgcccggcatgaaggagatgcggtcgaagctgtcggcacgaatggtcagctgctcgccgtcattaccgaacagggcctcctcatgggcgttaagaccgcgcagacgcacggcgtgcacgtgaatgccgtcaaccacctggccacgggagccgccatcggtttcggtggcatccggcacagggccaagacctgcggccttgcgggctgcggcgatgccctgcgcggtgtggaatgcggtgccggacggagcatccaccttgttcgggtgatgcagctcgatcacttcagcggattcgaagtacggagccgcaaccttagcgaaatagtcggcgagcacggcggaaatggcgaaattcggcgcaatgaacacgctctggccttcgcgaggcgcggccgcgagcgcggcacgaacctgatcgagtttctcttcggcccagccggtggtacccaccaccacgtcgacgccctgcgccacgagtgcgagcacattgtcaagagacacgctcggcacggtgaactccaccaccacgtcagtgttgccgggggtgatttggctcaggtcgtcgccggcgtcaagcgcgagcgccaattcggtgtcggccgcgttattcacggcatcgaccacatgggaacccatacgtcctttggcgccaactacagaaaccttgatcattgcagctccttcaagcgtgtcgcacgtacgagcgtacgaacagcatttcaaatcagtctcactcattctactgaggaatgttccatttacgaatgtaaagagacgcttcgacgcgtcaccgcccagccgatcaaggcgaacggaatcgaagcgagcacgaaaatccatggcagcatcaggctcacgtcgggtgtggcgtgatccaatatgataccggtgatcatcgaaccgaatgatgcgccgacggttcctgcggtgctcacccaggaaagaccttcggtcaacgactcttcggggacggtttccttcatcacgaggttgcccgatgcgaacaccggcgaaacagccagaccggtgataatttccataatgcccattacgatcagattgccttggcacaggtgaattacaaagaagccggcggtgatcgccgcaaggaacataatcatgtaacgccaacgggatcctttgagctcaagcgttccgaaaaccagcgcgcccatacatgaaccgaccgctagcatcgccagctgcacgccgagcacggaatcaagatgcaacgatttcatgacggccgtcatggacgtgtcgaatgcggtgaaactcatattgaatatgatgaaaaccagcaacaacggaatcacgccagtataagtgaatacgctacgtttcttggctgcgtcgtttgttttcagctgtgcgatggtcagcctgtcgcgcggtgcggaacccgaatcgccagtattgctggcatcgccatcgatggtcaatcgcacatcagcatcgtcggaagaggccgaaacgaccttgacttcatgcacgaccggcggctgcgtatccttcaatgtgaagaaaatggtaccgccaagggcgcaggcaatcgttggcacgaacaactgcgaaacggggtgcacggaagccgcaaggaacgctgcgagaatcggtccgaaaatgaatacgatctcatcgatggcggattccagcgcgtatgcggtgttcagcagttcgccgttgccggtgcggtcgagcacatacgcccagcgcgtacgcacgagcgcgccgaacgagaactgcgtaagccccatcaccacagccagcgcaaacagcagcgggatcggcacgcgcaccaatgcggagaacgcgaaaccaagcatggtgatgatttgcacgacaagcaccatcgaaccgaccttgcgctggccgaatcggtcgaacagtcgcgcgtacagtggcgtgaccgctgcggtggcgagcacatacgccgcgctcatcacgcccgcgatcgtccaattgtcgtacaggtggttgagtgcgagaataatgccgaggcccatcatcgacatcggcagtcgcgccaaagctccggaagcgcagaacgctttggttcccgaaatggagaacaatacggaatatggcgacttcggggtttcggttgcgctggtggcagccatgattatcgctccttaactttcgttgcgtccggcacgtgtgcccgcccacacatgctgcacgagggtagcggcgctcctccacaacgctgcccgcagtgcgttaccctacggacaggctggaaagcgccgcttttcaacgatgatcaagaacaagcaggatgcatacacgcatctcttacgtggcgcaccagcactagtcgttgtcggattgttccggaattccgtagctcaactcggcaaggatctcttcttctgttttgtcggcggcattgagctgtcgatcgccctcaatgggttcactcagatagtagaggcaggcgtcgatagcggtgagcggtacgccttccattgccgacagcaagatacgatacatatccaactgtgctaattttttctgaatttcctctttttttcgaggtttttttccagttttccaatcgacaatagtatattgtttcgaccgatccgccccatcgagacccccgaagaacaccgcgtcgagcttgccgttgacgatggtgcccaattgcggcacgttgacgacgatttgccgttccgcccacgcgggcttgcgccgtgcccatgtcgacgttgcgagacgctgttgccaatcgaatatcccgttattgtttgccccattattgtcttgattgtcttgcgattgcgccgcattgttgcgtcgcagctcggcaagcatcgccaatcgcgattcagttacgcgagtaccgccattgccgctcgcgccaacgccaatgccggcatcattcgcatcggccatgatgaaccgttccgcccaagcatggaactgcgtgcccagttgcgcggccggagacgctacgttcggtatcgggcgcaccagcccacgccagtaagtgcgggcaccacgctcgtccatcatgcctgcgcgcgcctgcagcgaggtgacgttctgacgaccggacgcaagaatcctctcgcccttcgcacgcaccgcgctgtcgaacgcatcctgcgacgcctctccaagcatgtcaggcatgagattgctgtcggccaccagcaattgcgcgcatcgcagcagcgaagcacccgtattttcgcaacgcccagcaccttcgccaccgacaggctcgccaacttgcccgccggcccgttcgccagcccgcccatcagtctgcccgccagcattgttcatcgccgaatccacctgcagcgcagacaaacgcaacgtctgcagggtctcatcgctcaactcgcacggccatggcaggaactggttgccttccgacggctcgagcggcgcattccaagcgtcgccgaccaccgcatcttcaaaatcgcgggcatgctcgcccacaaaaaatccatccggcaacggcgcatcgatcgaatgcagactggtcatgccgttttcggaggaatcgatatcctcaacttccgcaatatcggccaggttgctcggctcagccgctctggaaacgttattgagtatggaatcacgcacttccactaggaaattcgacggtttggacacacgtttgcgatcgcccacggcacgcggatcacggctttccgcattcgttgcgctgcaggtgagcagcgcctcatgacgggcgcgagtcaacgccacatacgcgaggcgacgctcgtcggcatgcaaccgacggccatactcctcgatttgcgtcaaatacagtccgtccggatcaataccttccatgtcatcgacgctcatattccgcagggtgccgaacacttcgtcgtcaatgatttccgcatcctccagcatttccaacgcttccaacggatttccacccacaagcgcgtcatgggggaatcgcggcagaatatcggcgtccacacgcaccggaaccggcaccgcagcaggatcggtcagccacgttttggcggtctcatgatattcgggcggcgtccacacgccatcctggaaaccgttgagatgctcttcatcaacgaccacacgcagatcgctgcccttgttggtggggaatccgccatcggtcatgccgaccacggccacggcatcccattcaaggcccttcgactggtgcacggtcatcagcaccacgtcgacaggcacatcgggagccaccgcgttctcctcgcgtgcgtcgcgcagcgaatccgcccatgagatgaacgcgcgcaggctcggcgttccctgcgacgcgatctcctgcatatacgtgtcgacgagcttcagcaacgcatcgatcggcgatttggcgagcgccacccgggatgcggcgagcgtggcatcggcctgaccgccgcgcatatgctcggccagctgcatgtcgatatcgagattcaatgcgacgatggcctcacgaaccacttccggcaacgggtggccaagcatgcgctgcacctgacggatcgcatccgcggcgcgaagcacttccttcgtcccttcacgactcaccctgccgtcaatgagttccgcgagatcgtcacgcaacatgaggtccacaaggaaaaccgcattcggcacttgatctcgatattcacgtacgatggcacggatttcagcatcggaaggacccgacttgggagttactccataaattcccagattttccggtttttcttccttgttggattgctcctgcacgattccagctgaaacaagcgcacgataccggcacatcgtgttcacctgttccgcggtatcggcgagcgcctgcagatcgttggcgctgatggagaatcgcggcgtggccagcaatcgcataagcgccgcactgtcggtatgatcgctgacgacgcgtagcaaagcgaacacgtcctgcaccgccgggcgttccagcaacgccgaccgccccactaccagcgtggtcaggcctgcgcgttcgagcgcttccgcgaattgcgacatgactcctttggaacggaacagcaccgccacgtgcggacgattgtctttcatgccattgtcgaggtcgcgcgaggaaggcgtgtgcagggcgatcgcatgtttggcgaagcgcacgaccgcgtcgacctcctgcccgaacgtgtcgaacgcaagcacgcccaccgttccttcgggggcttcgtcggtattgacgagcgccggaacgtcgacttcgcgcatcagcgagctgctgaggcgtctggcaggcaagcggagcggtttggtgagattgttcgccgcttcgagcaccatgcgtgagttgcgccgtgtcacggtcaatgcgaatggcctgctggtggcgtccatgccgaaatcgtgttgcagcatgcggaatgcgccagggctcgcccctcgccatgcgtagatcgattggaaggggtcgccgaccgcgttgaccgcgctgcgatgcgtgtcgtccacgtggaacagcgcgctcagcagtgccgcctgcgtggtggacgtgtcttggtattcgtcgaggagcacatgcgaatagcgtttgcggtaggccgctccgatggacgggaatcgggagacaagctggaatgccgcgatggtgaaatcgctgaattccgccatattgcaggcgcgtttttcggcatgatagtcaagcacaagatcgagcagcaggtcgcgttgcttggcgacgaatgcgagttgcgcgctgttgaacacgcacatgtcgtgcccgagttcgcggtatttctccagtttcttctcgtagtccgcgtcggaatcctttttcagtcgtttcggcagctttggcgatttcggctcttccgttggcacggtttcgccgtcaagcgccttggcgatctgttcgacgaacgcctcatcccagtcgcgaacgcgttgcacggcttcgtcgaagctggtgcagtcgccgccgatcatggagccggaaatggcgttggacagggcgaacacgttgcccgctatggtattgaacgatttcagatcgccgtcgaacgccataagatcatccatatgcctgtcaagcacggtgtggatgagctgcatggcacctgcttcgctcaatggctgtgtgttctggtcaaagccgacaagcagtccatattggcgcacgatggattggaagaaagcgtcgtacgtggagacttccggtttgaggaacgtcatgttcgctgatttcaggccgcgttcgcgctggtcgcgagtcacggccgcagacactcgagacaatagttccgaggccgctttgcgcgtgaaggtcagtccgaggatcttttcagggctcaccccctgttcgatcagcgtgatgatgcgtctggtcatcgtgtaggttttgccggatccagcgccggccaccaccaccacatccgcatacgagggcgcttggacgacggcagcctgctcaggactgtcggtgaacttcatggttccgctcatgccgttctcctttcgaatacggtgttctgttcgcccgcacaggccgggcagatcgtagtgtttctgcagtatttcacatgttccgccgtcggtcttgcggtgatttcgttcgccctgctggccgcggccgcatagaagaccctcgcgatcatggtgagggaccataccgccatcgtgccgcgtaagccaaggaactcattccaatgctcgtcgctcacttccaacggaggaagcatgtcatcgagtccgtcgtggaaatccttgtcgagttttttgacgtaatagcgcggtatgaattcgccggtattgagacttccattggcgaacagcgcctgctgcatatgcgattcggcggcggtgtcgccatacggcgcagggtatgcgtgcttggctacatggaatagcgcgctttgcgtgatgttcggcgcgttcgccaccgcctgtgccccgcgcatgccgctttcctcggggaatacgagtcccagctgatagcagacgagctgcagatcgttgaacaggccttcgccggtcggactgacaccggttttgtagtcgatcagacgcacctgctgcgtgccatccgccatttcacgccgttccaaacggtcgatcctgccggtcaaacgcacggtgagatactcgctcatgccggtttccggccatcctccgaccaacgctcccataatggcgatcaattcgtttcgtgaaatcgcgcgaacgccgtccatcgcattgtaggcgtcgagaatatcgtcgaaatcgaattttgcggtaaatttcagctcaggttcggctttcgtaagttctccaacgctgaatgcatcattatttttaatcggataatcaccatgattcgattgcacgaaatacgtggcgatgttacgcaacgcctcctgcgcctgctcatctttcttcaacgcctgataccgttgcgcgggatcggcaatggcgttgaaatcgccgcatagacgcttgtattcggcatacatccattcggtgatcgcattgatattgtccacgtcgctgatggcggtatggtgttccggcatatcaagtccggcttcggtggcctgttgcgccaccttgtggatcagcgagccgaaactcgtggcgacgctgcccatgcgcgggccggagaagcggttttccaacatccaacacaccgggcacgcccacagattgtctaccgcagaaggagacaaagtcaccacgtcggatcgccgcgatttgccgtttcggcccgacgtcgagctttccgacgtgtcgctcatgcccgtccgcatgacggccgcgatcttccgcatggtggcctcgaccgtctcccccataaacggccaacggtcagggtcggccgccgtaacaccatgcgaagccagcaatgccaacgcttccgcggcatcacgcgccttcgggctgtcctcaggttccgacgcaagcacgcttcgggcggccgcgaccagaccacggggatcggtttccagccccgcgtaatcgccttggccgccgaccgacgcatattctcgccgttccatatcggcgtcgcgatcgcggtcgaagcattccggcatatatccgtatagaaaatccgaaggcacattgtcgtcattcagcacggcgctcaccaccacacgctcgccggcacgggtcaacgccaccaacaggctcttctgctcggaggcgagcaccgacgccagttgcgcgtcctgcctgcccgccggagtgacgatcgtgtcggacaatacgccgtgcagcatcacatcggccagttcctcaccgccgaacaacgtgttgcgtggtgtgagattcggccactgcccctgctgcaaagccggcagaaaaaccagattccagcgctttcccgccgctcctgcgggagtcgtcagggtcaccgcctgatcaatgggcgcggtatgcgccagcgaatccgcctcaatggtcagcaaacgcacctgttcgatgaacgcctcgatggtgtgtaccgcgaattccccgcttgactcgccgcctgaagcatagttgaacaaacgcatcgccgcgtcaagccgatcattcgcggcacggccggcagccgaatgctccagcgccacacgctgccagacttccgccttgccgcaggccctccatgcgcaatccaacacatattgcggttcacgcgaaaccagtttggcttccgactcgcatgttttgtcaagaaccttccacaatgatgcgaacgccttgatctgcggatccgcgcccagcacggaggcgatcgcatcgaccacgcgatcggtattgccctccataagaagcacgtacagcgcttccatactcagcgcgaaatcgccttcatgctcgtcttcatgctcgccatcggcgcgaatcgcatgatagtccgtcatataatcgcgccaatccttcatcaaacgagggagcaacgcctgttgttcgacggcagcgtccgccgcatcctcatcatcttcgaaaccatcttcaaagtaatcttcgaaatcatcttcgtcgtattcttcggcagcatcctcatcatggttcgcagccttgctttccacaatcgaagcgagcgaaaccaacgcgttcatcgcggattcgatggatgcgagacgggccggacgcccctcatgccgttgatcaccaccgaccgtgatcagcggagatcccataatcagcgccacgcgcgaacgaatataggatccggcggtctgcaggtccatggtcgaagccgcgatcgtctggtttttcaattcagccaactcgatcaacgcgaacagaccctgcacgaacggctcatccttcaacggccgggtcacgctggaatagcgcacgggaacgccgtcagcgcgcaaccgctcgccgaatgcgcgcacggtggcattgtcgtgcgcgatcacggccatgtcgttccatacacgggaacgttgcaaatgctcagttttgatcttccacaccacgtcgtcgagctcttcggaagaagaacggtacaaggccgtttccacactgccatcggccggcgtgacacgagcgcccgcatcgtcggccggcaacgtttcgatgggcatcgcgcctggcatatcgctcattttgccgggacgatcgggcagaggcacgtccgtcgactccgtgcttgcgatcgacaggctcactcgcgtcgcgacaagcgtgcgatagtcgccatgcacgccttgctggttcgacacggtttgcgtggtatcgccttcgtgcgccgtttgcagaccttcgatgcgttcaagcctcgctcccatgcgcgtctgcgcctggttgaacagatattccggatatgatcctcggaacgtctgcacggcttcgtcgggattgccaaccaacagcaggcgcaccccgcgttcatgcagggcttcaagcagtgcgaaaccagccaacgtcgtatcttgaaaatcgtcgacgatcagcatgttcgcaatatcggcttcctgtatgccagacacggcttcggtggcgtcgatcatcagctgcgacgcgtcgagacgatattcgccaggataagacgaacggatcgcctcattgtattcctcacgcaaggcgaaggcgagacgccactgagtgcgcaggcgttcgcgacgttcgtcaagcatgccgtccctgctggccgcacgggcgatcagcatgtcttcgaactgcggtttcgcgccaatctcgttcatgcgtgcgagcatgtcgcgcaattggttggcgaatgcgtcggtggaatcgtcggtcaccagtcctgaccattcggaaaccgcgaaataggtgcgcagcagatcgcaggtggcgcaatcgtcgccatgttgcctatgctccacatgcgaagccagtaccttgcggatgatcacatcctgttccgcaccgttcaacagtttcggcaacggttcgccttgacttgatctcacggccgtcagcagacggaatgcgacggcaggcaacgtagtgaccggtcgcgcctgcgacacggccgacaattcgcggatcgcccgatcgcccaacgcatcggcgatctgcctgccagacaccgtcatcacggcattcccgtcaccataccgcctcattgcggcaaccagcatgcccagcgcaaactcggtttttccactgctcggcgcgcccgcaaccaacgtgacgcggtcaaggtcttccaaattcatcatgcctcccaacactactagtctcgccctcctttacctgacaaatccggaacctacaaagttgtctcgaagccaacctttatccaacacaatctacggtgcaaccactccttcgtggcatctgcagcaacgccgacaacacatcaatggtcatttccatttgagccagatgcccgtcatccagcaactgaatgtatttaccctcatcgtcgccacgaaggccgtctcttaaggttcgcacgttctttctatcactacgacttctattattcagccacaacatgtctcagatgcccgtctttgtatatggacattttgaccccttgctgataggtttccgggttggtcttcagttaggataggatccagagagatcggccgaaaagcatacgcaccacgaggaaagagagcatatggaagccctgaacggcattccccctcaaatccctgggtatacattcgcccaaaagttgggttcaggttccgaagcgaacgtgtatttgtaccagcagctttcccccagccgacaagtggccatcaaggtcagcaagggaacgctcgatccgcgcgcggcggcgcggttccgttccgaagcgaacttcatgggcaggatctcctcgcatccttacattctttcggtgtatgaaagcggcgtcaccaccacgggcaacggctacaccgtgttcgaatacgctccgggaggcaattacaagaccttcctggaatccaacaggctcaacgcagaccagatgcttaccgtcggcatcaatctggcgagcgccctttccacagcgcaccgcgaaggcatcatacaccgcgacatcaagcccagcaatattctcatcaacacgcatggcatgcccatgctttccgatttcggcatcgcgggaacgatctacgggcgtcccggcatcggctacaccatcgcgtgggctccgccggaagtgctcgcaaagaacggcggaggcaacgaatcctccgatatttattcgctgggagcaacgctgttcgccatgctgacgggccagtcgccatatgaatacggctattccgcggccctcggctcgaccagaggcaaagaacgcggcgctctgctgagaaacatcattctcaccgatccgctccctaagctcaataggccggatattcccccgcaagtggagcggattttacgcaaggcgttgaataaaacgccggaagacagatattattccgcatacgatttcgcgcgtgacatgcagcgtgcgcagcaggagttgtatggccatgccacgccgaccacggtcgaaggcgaaccgccgttcccgcaaaatctgtacgcacagtcccaggcaagcagccaggcagccgcggttgtcccgaaacagcgcaacacttgggccaagcctcttgcgattgtcgtttcggcggttgccgcgatcacggccgtcgcgttggtgttcgcgtatgcgatcttgccgaatatggattcgtcttccgacaatagcagcgtgcagatcgagaatccgggaacgcacgatcaggacaacgattcgcccgattcggccatcaccacaagtagcgtgcccagtgtcgagaatctggccggctcatattccggcgatggcagcagcgtgcagttcacatgggtgaatcccgaccctcaggacggcgattcgtacgcatggtcgctggtaggcgatgcaggagtagacccgaacgcccaaggaaccaccaccaccgacacgcgcatcagcatcaaacctgccgacggctcgcagacctgcatccaggtgagcctcatccgagcggaccggcagatgtcgcagaatcctgcgatcgcgtgcgcggccaaaccataagcatcaccatacttcgcaaccggaccggccaacggcatattttcaatcgcaaacggcatatacggaccgatcacaacgacaatcggaacattcagggaagagccagaaatgggcaaacgcaagaacggtgccaaccaatcggcgcaatcatatgaacgtcaactacgtttcggatcaatggtacgcaaactgctgttgccgtcgggaagcaggcggtggatcacgccgatcgtcatgctgcttctgctgctgggcatcatcgcgggcgcgttcatcgtcagttcggtgacgcaacggcatgtgcagctcgacgacggcaccgtgtggatcacctcgttgaaagatcgcaaggccgcacgattcaatgcgaagaacaaggatgtggacgccggagtctcatccgcagcctcccgtttcgacgtggcacagcatgatggcgacacggtgatctccgaaggcaccaaagccagcaatatcgcggcttccaccattagcgaaaccggcaacaccgccatcaaaacggatatcgaaaccattatcggaggcgataccgcggctttcatcaacaccaaaaccggcaatgtgtgggtgggatccgcttccgatgtgaaatccgtcaaccccaccaccgacaaaccgaacatgaaactgggatccggcggaaagatcgcggtgacgcatgacggaaccgtatacggataccgagcttccgatggcgcggtgatgagcatcaaagggccgcagggcacgcgtgagcaagtcggcacgatcgaaggcgccccgcacgccgaatcgttcaccgtcatcggcgaaaccccggttgtggctgcgaaaagcaccgtgtactggccgcagggaagcgcgaccatcaacctgcagggcgatatgacgctgcaggccccctccacggacggcaagcaaaacggatgggtggccgttgcgacgccgcacggactcgcaacggtgaatctcaacaccaaaaaaaccgcggaaacaacgaattccggcaagggcgaggccgcccaaccggtatccacaggcggatgcgtgttcgccgcatgggcgcagaaagccaacaattacgccaaagtgtgctccgaagacggttcagatgcggcattcgacaccctgaccaacatcaatgccacttcggaactgatattccgcaccaaccatcgcctagtcatactcaacgacgtggtcaacggcaacgtttggaatccacaggaatccaccaaggtcatcaaaatccaatggaacaaggtggaagccaaacagtcgaagcagcaggaacagaacaacgacagcgccaacaaccagcataatttcagcaagacctgctcgtcgcaatccggccagatcaaagccgaagacgattcgttcggcgcgagaacaggatcgcagcagatcctcgacgtgctccgcaacgacgaacagaccgactgctccgtactgcgcatcacctcggtaagcgcccccgacggcgccaacatcagcgtttcccccgtatacgacggacgatatctgcagctcgacgcttccgcggcatccgaaggatccgtatcgttcagctatgaaatctccgacggacgcgggcaaacctccaacgccaacgtgagcctcacactggtaggcggggacgacaacgcgccccagcaaaccgatacgccaccggaaatcgacgtggaacaaggagcggcctacaccaccaacgcgctgggcagcttctccgatcccgacggcgacccgctcaccctcgtatccgcaaccccgcaaaacaccgaccaggtgaccgtttccacgcgcgccgacgggcagctcgtattcaacgcgggatccatgtcttccggacgcgccggcatcgaagtgaccgtttccgacggccagcagaccggcaccggcatggtgtatttctcagtgaaaccggccaacacgctggccgcggtgatcgatccggtcgccaagcagaccacgccagacacccgcaccaccatcgcgctcaaacaatacgtgcatggcacctcggccgaacccgcgcagctgaccgccgtggaaaccccatccggcgcatccaccaccatgaacgccaccgatatgtcgttcaccttcagcgcatccaaccccggcacctactacgtgccctacaccatcacacaaggatccatcccctcgaccggcctggcccgcatcgaagtgcaggcggtgaccggagactccgccaatcccatcgcagccaacgacgtggcactgctcggcgccgacaacaccgcaatcgtggaaccactgtctaacgacgtcgacccgatgggtggtgtgctatccgtgaccagcgtgaccgccgatgcggcgagcggcatcaaaaccggcgtcgtaagcaacaagcgcgtctacatcaccgcacgacaggtaccgaccgagcccgtgcagatcaaatacagcgtcgccaacgcggcaggcacgtcaaccggcgtgatcgtactgcagccaccggcactgaccacctccaactccgtgccgaaagccgacaacatcaccacgcaggtacgcaccgacggcatcgtctccatcgacgtgctcgaccacgtgacctactccgacggcaccacggtaagcctgcaaaacgacctgcaatacgacaaaaacacgttcaaaggactcgtattcgtatcaggcaacaccgtacgataccaagcatccaaccaaaccggatccttccccgtaacatacacggtcaaagacaatctcgacaacgcggcatccgcgacaatcaccatcaacgtgcaccaaaaagacgcttccaacaaggctgcgccaacaccttcagacgtcgaggcgcaagtcgcagccggccaaaaagtccaaatcccgatcaccttgaccggcatcgacgccgacggcgacgacgtgcagctgctcggcctcggcaacaaggcgccgacactcggacgcatcagcgaagtcgacgccacctacctggtatacgaagcttatgccgactccgcaggaacggacaccttcacatacgccgtcgaagactggaccggccaacgatcccaagcgcaaatccgcgtaggcgtattcaaatccggcacagactcgggcgtatacgcgcgcgacgacgaaatcacattgcgccccaacaccgcagcaaccgtgcccgtggcgcaaaacgacatctccggagacaacaccgacctgaccgtcagcgaaaacgtcgaatcgcaagacatcagcaatgtgaccgtggcggacaatgcgctcgccttcaccacgcctcagcaggcgggcacctattacgtggtgtatacggtcaaagacaaggcaggattgtccgacaccgcgacgttgacggtgaacgtggacgacaacgccaccatcgaaccgccgaccgcatacgactaccgtgtgccatcttccgcgacgatcgataagaaatccgtcgacgtggacgtttcgcaatggatcgcgaatccttccggcagcgccgacgaactgcaggtggccgtggatgattccgccaccgaccatgcgcatatcaaaggcggtgacaagtccacgaccattagcgtggaattgacggatgaggcacgagccgtgccatacaccgtgaccaacacgacatacaacatcacgtccacggcgttcatccaagtgcccgcgtacggcgtgttcccaccgacccttcgaccgaaggcgccggcattgaaggtgaacgcacgcgagacgatcaccatcaatatcgccgattatgtgcgcgtgggcgcaggcaagaccgcgtatgtggacggcgccgattcggtgagcgccacgaaggccgcggacggagacctgtatgtgaacgaccagacgttgaagttcaccgcatcaaaggattattccggtccagcgtccatcaccttcaccgcggtggatggcaaacgcgacaagaacgataatgtgaagatcatcaattcggcggtgttgacgttgccgatcaccgtgatcggacgtgacgtgcccacgccgacgttctcctcgtccaccattgacgtggtcgcaggagaaagcgccaccaccatcgatctgaccgcgttgacccattcggcgtccgacctgtatgacgatgagaagcagtacacgtattcgggcggcaccgattccgaccaggtgagcgccagggtgaattcgaacggcaagctgaccgtgtccgtcgacaagaccgcttcgccgggaacaacggtgagcgtgccgatttcgattcaatattcgaagggcacggtgagtgcgggcgtcacggttcgtgtgacggcctccaacaggcctttggcacgcatcaacgcgaaaaccgtgaaggtcaaggcaggatccagtgaggaagtgaacctgctgtccgatgcgtataatccgttccccgattccgcattgaccgtgaccggatgcacgtccgatggtgcgtcgaagctgaccgtggactgcccgtccaacggtgtggtgtcgatcaacgccgcgtccgatatcggcgcgagcaccaacaaggtgatcgtcaacgtgcgcgatgccaccaatacaaaggaacgtgaggtgacgggcaccatcaacgtttcggtgatggacaagccggatgcgccgctgctctcccccatcgccggagacccgcaggatggcgcggtgaatctgagttggacggccggctcttcgaacggcagtccgatcagcgaatacaaggtgtcgtggggcggcgacggttccggcgagaaatcgtgcggatccgtgacctcctgccaaatcaccggcttgaagaacggcaagacgtactcgttcaaggtgcaggccaagaatgaggtcggctggtcgaaggagtcgaatggcgtggaaggcacgcctgacaagcttccggacgcgccgaccgatgtgaaggccgaggctagcaagaacaccatcactgtcacatggaaggctttggagggtaatttctccgccgtcgacaagtatcaggtgacgttgagcggtccgaatgtggcgaatccggcccaggaagtcactggcaccagcatcacgttcaaattcgacgacaatgcgatcaccgacggcgcatcctataccgccacggtcaaggcgcataacaaagtgaactggagccagccctccacggcatccaatgccgtttcgccttggggtacgcctgacaatccgactatttccgccgatcaatcaggcgacaagatcgtggtgagagggcggatcaatgacgcacgtaactcgaaataccagtcgattacggtaagcatcgagggcgaagacaaatccgtggagacaagcgccaaggattattccgtcgaattcgacattaagaacgagtggtactacagaaaacttaagccgacgattaccgtggttacggaacgcagtggctcattgcgcaacgaagcgtccgtttcgactttcacagcagtcgatcctccaaccaatgtgaagctggaactcaacaacaacacatgtgtggcgacctggtccagaaaaggtggacgcgtcacaggtttcgttgtaaaggccaagggttattacgatgatgatgttcatgagagcagagccgaatggccgctttccggtgattggagcacctgcgatacggtaagcgtgcaacagtacttcatcgacacctcacatctcagcgacccagcaatcgctaccgataataccatcggcaacaaaaagccagcggaaatcacactgccatcctcattgacgtgggatacacagaacgccaacatcattcatgtcaatggcggtagttgggaggcccacgggcgaagtgtcaaaggccagatcgtcatcactccggcaggggaaagctcgcatacctacgattggccagctaacggcacactggatgtttccgacatcaccagtccttccggtaccagatgcgattgggaggttcgcgtgatcaccactgccggggaaccagaaatcaatgcgaccaagaaaagctctgatcccgtgaccggagtccgatacgaggagaaaacccccgatccggaaccgggaccaacccctgataatagagagacgcaatcctcgatagacaccaatgcttcagccatctcattacgaacagggttggcaggaaaacaggcgcgaggcatctcattcaccgtcaaataagcaaattcaacatcacaaccaatcatcaatacgaccaatagaagcaaccaaggagtacctatgagcaacgaaaacgacgacgccacccagctgggttccattgggcgccatatgagcaagccgcaacagcccggcaatccgcaggcacgccccgcattccaagctccaagcctgccgacgcatccgcaggaacaggacggagacgaagagggcacggtactcagcacgcataacgctacccactacgccgccaacacgttcgacgccgacgaggagggcacggtactcagcacgcataacgcaactccttccaggccgacgaggcctacggttccaatggcgcagcccatgcaggcgcaaccgacgcaatccactccaacacaacagccgctaccacaatcgcaatcggctcccgtaatggcaacgcgccaattcccacagactacggcaccaagcgtcaagcccgcgcagccggccatggcttcttccatgatgtccgcgccgcaggccgacatcaccgaattccatgaactgttcgcccaactggtcggcaacgtctcccaagtcgtggtcggcaaggaacagccgatccgccaatgcgccaccgccatgatcgtcggtggccacattctgctcgaagacaatccggggaccggcaaaacgcagctggcccgaggcctcgccaactccatcgacatgtcgttcaaacgtatccagttcactccggatctgctgccgtccgacgtggtcggcgtaacctactacgaccagaagaacggcgaattcgaataccgcgaaggtccgattttcgcttccatcgtgcttgccgatgaaatcaaccgagcctcgccgaaaacgcagtccgcactgctcgaggtcatggaagagcagaaagtcaccgtcgacggcgaaacccatgcggtaccgcagccgttcatggtcatcgccacccagaaccccatcgaacaactcggcacctacaaactgcctgaggcacagatggaccgtttcctcatcaaaacaaccatcggctatccgagccatgacgtaagcgtgaacatcctcaagcaggtcaacgtcaccgaccgtgcctccaccgtacatgcggtgctcaccggcaacgacgtgctgcgcatgcgcgccatcagcgaaaccgtgcgtctcgacgacgcgatcatcgaatacatcgtacgtctggtggaagcgacccgtcacaacgaacgcatccaagtcggatcgtccatgcgaggcgcgctcgcactgacccgatgcgcccgcgtgtgggccgcgtccagcaatcgcggatacgtggtgcccgacgatgtgaagcaactggccgtcgccgtgctcgcacaccgcatcacgctcaccgcggaggccacattcgcgggatccacccccgaacagatgatcgaacagatcctcaatgaagtgccttcaccgaccgtgggcgccaccgcctgaaacgcacggcgcagccagccgcgtacggcactgcacacgcaaagcgcacaccccacacgaaacgttcgtaaacccccgaaaggtcaagcatgcgacaatccaaaaccatgcagcgcaggagaaccatgcaacgatccctgcgacgcatcaagcatcgcatcaaacgactggtcacctcatacgtgtcgccgctcggatgggccgtgaccggactcgccatcgcctcactcatagcgttcacaatcctcagctggcatgaactgctgaccatggcgatcgtgttcgcatgcatgatggtcgccgccatcatgctgtcgctcggcaacacgtcgttcaccgccaccatagacgtgtccagcaggcgcgtcaccgtgtcagacacggtgaaagtcgatgtgtgcgtcgacaatccagggcgcacgccaaccacatcagcgcgcggcgacctgcccatcggagacagccacgaacgattctccatccccatgctcgccgccggccaatcacgccaaaccaccgtggaattcaccgccgtctcccgcgcggtactgccggtcggccccctgtccatacgtaaaggcgacccattcggactcgtacgacacgaaaagaaacttgtcgaccaaatcaacgtgttcatccacccgaaaaccgttatgctgaacacactcaacgccggaattccgcgagatctcgaaggccagccaagcggcgaaatcgtcgacgacgacctcgatttctacggactgcgtgaatacgagccaggcgacgacgtacgcaacgtgcactggctcagctccgcaaaaacaggcgcactgatgatccgtcaatacgaggcgacccgacgcaccgacaccgcattgaccatcagcgtgaaccccgacgactatgtgagctccgacgaattcgaactggcggtatccgtccatgcctccatcggtgtgcaatgcctgctccaaaaccgaccggtgacctcacacgcgggaaccgaacacatcatgccacgcaactccacggaattccttgacggctgcagcgccatctcccccgatatcagcgacaatccgaatctggtgcaaaccaccctcacccacgcccccgactcatcgttctactacatcaccgtcggcaggctcaaaaacatcgacgaaatcaaacacatggcgctcgcactcccccgatccgcaacctgcgtggtactgcaaaccgccatcggacagccacgcgccatcaaacgatacgccgatttcaccctggcgaccgtaggaaacctagacgatctcccaatgatcatgggggtactggaatgagcaccacaggactttccacccacaacaccaacaccggcgacaccggccgcaccaccggattcggcaacaccttcaccggaaccggcaccggctcatgggccgactccacacactccgtcatctggatgtcacgagacggcaaatcacaggcactcccctacctacgccggccacgcgcctcgcaatacgcaagcctgctcgtcgcagccctactcaccctcgccgccgccagcaacctcatcgacgtctacggatcggccacatcctgggcgctcgccgccattccggccaccatcatcggatctctcgtggcgctcgcaggcacggttccggcacttcgtctctggtggcagatgctgttcatggccgtcgcccagctggttgtcggccctgtactgttcctcaacgacaccaccatcgcccatattgttccgaccttgcgcacgcttacacaaggctggatgaacatgctcggatcgttcaaattcattctgtcggtcgaacctcccaccggtaccgccgatgactgtttgctggccgtatggaccatctgcctgtggttcgcgctactgaccggcattttcgcagtgactgaagatggccgattcaccatgatcgccattattcccgttaccgccaatcttgcgatttgcgcgctgctcggctcatcttccggctattaccgcatgttcgtaggcaccataatggcgctcatattggtgatttggatcagcgcacgttggaaaatactggaattgggacgttggctcagttccgtcgtgatcgtggtgctttccgtcgcattggcgattggaggatgcctcgtcgtcgatcaggaccgcaccattctgcgcgaccattatgatccgccgcttagcccgtacaattacaccagtccgttaagcggcatgcgctcgtacattaaaaacagtaaggacgacgtgctcctcaccgtcgaaaacctgcccgctggatcaagcgtgcgactagcggtcatggaccgtttcgacggcaacgtatggaatctgtccgactccaccatgtcgtcggactcctccaattaccgacgtgtcggcacctccatcaccaacaatgccgaaggcaagaaattcaccgccacattcaccgtggacaaaggactcagcgactactggctgcccatggccggagccgcatccagcgtgacattcgacaacagcgaaaactccgactcgttctactacaacagcgacaccatgtcggccatctacccctcacgcacctccgaaggtctcatctacacggaaaccggcatcatgccaacggttcccaccgacaaacagatcgccaaagcagacgcggccgccatcagccagtcaaaagccgaagatgtgcccgactgcgtagacaaactcgccacagccatcgccggaggccaatccaaaggcggcgaagcagcccaggccttagccgaaaagctcaaagaaaccggctggttctcacacggattaagcggcgactacccgtcaaccgcaggccacggcaactaccgcatcgaccaactgctcgccgggacggccatggtcggagacagtgaacaatacgcctccgccatggcattgatggcacgcagcctaggtcttcccagccgtgtggtactcggattcctgccaaaagacgacgaaggtgaaatcagcgaaagccgcaccgaagaacaaggaaaaaccaccatcacgaaattcaccggcaacgacgtgaccgcatgggtggaaatcaaactggacagctacggttgggtggcattctatccaacgccaaaggaaaccaaagtccccgacgaaaaccagaacctcaccccaccgaatccgcaaaccctggtacgccagcccccggtaccactcaccgacccgctacgcgacgacacccaggccaaaggcaagtcctcaatcggcggaagcatggccgacgaaacctcagccaacctgttctggcagcatttcggcagaatcgcaagaaaagtagccatctacggaagccctctatggacgctgctcatcatatgcggtctcctgctcgccatcaaagcgatcgcactggcacgatcaagaaaacatggcagcacgcagcagcgtgtggcagccggctggcaatcggtcgccgcgctcgcacggcaaagcggactcgacattcgaggcacacgcagcgaacaggcggtttcgatcgcgaatcagatggatatttcccgcgagaccttgctcgctttgggcgcgcaagccgattacgcggccttctccggtaatttcgtcaacgaagagcatgtgcagcagtattggcacgatattgcgcaggaacgcaagtacatgctcaagtcattgccgacgttacgccgatggcgtgccaagctttcgcttgccgacgttttccacttccgcagcaaccgcagcgggcggaacaacggcagcgatcggaagcacaatcgtaagaaaggacgggactcatgatcttccgtagcatcgaggccggcctgaatagcaatgtcgggtgcaaaagaaaaaacaaccaagacaacgctctcgccagccgtggcgtatatgtcgtatgcgatggcatgggcggcggcaaaggcggcgagcgggccagcgcacaggtggcggcatgtttctcgcagcttgccgaacagccgtcgcgcaaccgtacgtccatcgaacatgcgttgagccaatcgcagcaacaggtgctcgaacttggccaggagcttggcggcatcgccggaaccaccatcaccggcgtggtgctgccgactcgcgttgaagatagcgtgcatgaacaagccatcgatgagtactgctacgtcatcaatgtcggagattcacgcacctaccatatgcgcgccgatgcggaaggccattggatggcggagtcgctgacccggatcacacgtgaccattccgaacggcagaacgccatcgacaccggcgaaatgctaccggacgaggcgaaccgatacataccgcgcaatatcatcacccaatgcgttggcgctcctgacggcattcagccggactggtatgcggcgcgctccacgggacgtttcatcatctgctctgatggcctgcacgcgcagatcgatcgggaactgctcgccgatgtggcggccgcatatggcgatccgcaagtcgccgcggatatgctggtgcagtccgcgctcgacgcgggcggcaacgacaacgtcaccgtgattgtgcttgatatatgcggcaaatcatcggattattcagcaaacgacgattggaacgtcagcaaaatcgacgatcacgaggatatcggcgatttacaggaaagcacattgcaaacgttacgtgccgtccaataatgcgcatgttcccgcaatgacaatcgtcaataatcggatttgtcacgttatatcagcgtattcaatacaatatttacagaccacgagataaggagatcatgatggtcgatttcgatgccgcggtcgcggccgtgcaggatccgaacgcagatcccgtattcctggcgaaaatcgcttacgaaaatccggaattcggcgcgaatgtggttgccaatccgcgtgcgtacccaggcctgaagcgttgggtcgcccagttcggcgacgaacgcgcacgtcagcagctggtcgcgatggggtggccggttccacaggacggaatcatgcagcaggaggccgagacggtctctgagcaggtgcaataccagatgccaagcgagcaggtgcaataccagcctgagccgtttgcggcaacacctgcatcgaatgtggcgaacgatgcttcgacggaatacgtcgacccgtataccaaccccgcagacctgtctgaagtggctgatttttcgccgattcagccgcaggagccagtcacgtcgaacgctggtttcaccgcagaattggccatgaccacggaagatcagatgctgatggccgaaatcgcaagcaaagctccggagctgcaccccttccttgcacgcaatccgcatatctacccagatctgctcaactggcttgccagtctcaatgattccgccatcaacgcagccatccgtctgcgccagtaaccctggtagaacttggcaaaagcccgacgaaggccgccaaacaaggcctaataagacctaataaaagccgcttgcattggtaagctttcgtaccataatatgttcgttgcgccgtcatcctcatttatggattgacgacgcaacatgtatcgcggcgcgaaggaaatcagcgctgttcgaaagtgaagaactggtctccgatacgcaccgtgcaaggcgcatcaagcttcatcggcttgcgttcgaccttgatctcctcattgtcttgaatgatgtacgtgccgttgagcgaaccgtaatcctcgatccacaatacgccatcctgatcgaagctgatcgccgcatgattgcgtgagatggtgcgcgtcggatcctccaacttcacggatttcgcaccttccggcacttcagcggacggcttgcgccccagcagcacacccatatcgacgatcacttcctggccggtctgctcgttgtaaagcacatactccagcttcggctgcttcatggtgaatgccgaagacagcaccgtgccatcccagtcgatgtcatcatcgtcattgaccggttcgacgtcggacggttccagcgatgcggcagcctgttccaccggctgtatgttcgccgcatacgattccgcggattcctgcacattttccaatgcttggaatgcttgggattccggtgattcgtatgttggctgcgatgttggctgcgactgcgcagcctccgccatggcgggctcaacgagagaagacattactgtggcatcatcgtcataccaacctggttcaggtggaggcggatatggaagaaagctcataccttcattgtaatttgccatgcgattttgcgatgaagatatccgctctgtaatacggacggttccgcaataggttgactgttgtcgcaaggatcgcagcaactgcagttccgcattaaaaatagttccgcattaaaaaaatggggatcagctgtttccagccaatccccattcatgtattgagatgatttcagacgttatgccattccatcatcgcttttcggatcacagggtgtcgcccaaatccatctgaccgccattgtcgtccaggaagtcatccggattgaagtcgtcgccgagcttcagatctccgaagtcgatgttcgagaagtcgacttcggacagatcggcgtcgccgaaggcggcatcggactcgtcgccacccaaaccgaagttcgggtagatggtgtcgcgaatggccttgtcaggctcgaccacagcgttacggtaacgggcaaggccagtacctgccgggatgagcttaccgatgatgacgttctccttgaggcccttgaggtcatcgaccttctggctcagagcggcttcggtaagcacgcgggtggtctcctggaaggaagccgcggacagccaggaatcggttgccagcgaggccttggtgatgcccatcagctccggacgaccggcagcaggcttgccaccttccttcacggccttcatattggcggccttgaagcgggcctgatccaccagttcacccggaagaaggtcggtatcgccggaatcgatcaccgtgatacgacgcagcatctggtgtacgatgacctcgatgtgcttatcgtggatatccacgccctgggagcggtacacggtgtgcacttcctccacaatgttcacctgggcagcacgcgggccgaggatgcgcaggatcttcttaggatcgacggagccttcgatcagctgggtgccggcttcgacatgatcgccgtccttgaccatcatcggggcgcgacgggtcaccgggtaggcgatcggctcgacggaatcgtcgtccggcttcaggatgacctgacggccgcgctcggtgtcttccaccttgaccacgccagcgaactctgcgatcggggcctcacccttcggagtacgggcttcgaaaagctcggtaacacgagggagaccctgggtgatatcggatgcggaagcaacgccaccggagtggaaggaacgaagcgtcagctgggtaccaggctcgccgatggactgtgcggccacgatgccaacggcctcgccgacatccaccagcttgttggtggccagcgaccagccatagcacttggcgcacacgccgcgcttggattcgcaggtaagaacggaacgggccttgacctcttccacgtcgtgggcaacaagatcgttgagcacgtccatggacagcgcgtcaccggccttgtacagcacggtctcgccgtcggcgggatcgatcacgtcggttgcgagcagacgggagtacggaccgccatcggcggccttgaccagatgcaggttgccttcagcatcacgctcgccgaccttcatcgtcaggccacgcttggtgccgcaatcctcttcgcgcacgatcacgtcctgggaaacgtccaccagacgacgggtcaggtagccagactctgcggtacgcagtgcggtatcggccagacccttacgtgcaccgtgctgggagatgaagtattccagcacggacaggccgtcacggtagttggacttcaccggtcgaggaatgatctcgcccttcgggttagccacgaggcctcgcatgcctgcgatctggttgatctgcatcatgtttcctcgtgcaccggactgcacgatgatagccaggttgttcttggagtcgaagtgttcctcgaccgcctcagaaacctcgctggtgcacttggtccacaggtcgatgagttcctgacggcgctcctcttcggtgagcataccgatttcgtagttctcgttgaccttttcggcttcggcttcgtacttctcgatgtactcgtcgcgctcggacggctggataacgtcggagaacgcgaaggacacaccggaccacggtgcgcgggtgaagcccatatccttcagcgcgtccagcgttgccgccacctgtgcggtggagtaacgggttgcgatgtcgtcgacgatcttgctcagacgcttcttcggagcctgatcgttcacgaacgggtaatccaccggcagcgtgctgttgaacagaatacggccataggaggttgcgaaaagcacggaaccatcatggaagcgctcttccttcaccacggccgggctgcccggttctggatcgactacttcgatttcgctcggctcccagcccttcggcagcacaaagtcttccggaaggcggataagcaccttggcctgcatgtcgatctcatgcttgtcgagggccatttcggcctcttccagcgaggagaacacgcggccctggcccttggcaccgtcgatgacggtggtcaggtagtacagaccgaggatcatatcctggctcggcatggtcacggtgtggccgtcagccggcttcagaatattgtcggaagccatcatcagggagcgtgcttcagcctgagcttcagcggacagcggcaggtggactgccatctggtcgccatcgaagtcggcgttgaatgcggcgcaggcaagcggcggcaggtggatggccttgccttccaccaggatcggctcgaatgcctgaatacccagacggtgcaacgtaggtgcacggttcaggagcaccggatgctcggcgatgacctcttcgagcacgccccacacttcggagtcgccgcggtccacgagacgcttggcgctcttcatgttctgggcatagttgaggtcgacaaggcgcttgatgacgaacggcttgaacagctcgagagccatcggcttcggcagaccgcactggtgcatgcgcagggacggaccgaccacgatcacggaacggccggaataatccacacgcttaccgagcaggttctgacggaaacgaccctgcttacccttgagcatgtcgctcagggacttcagcggacggttggaggcgccggtgaccgggcggccacgacgaccgttgtcgaacaaggaatcgacggcttcctgcagcatgcgcttttcgttgttgagcatgatttcaggagcgccgagttcaatcagtcgcttcagacggttgttacggttgatcacacgacggtagaggtcgttgagatcagaagtggcgaaacggccaccgtcgagctgcaccatcgggcgcagatccggcgggataaccggaatcacgtcgagcaccatggcctccggcttgttgccggtggtcaggaaggcgttgacgaccttcagtcgcttcagggcgcgggccttgcgctggccggtaccggtgtcgatctcttcgcgcagctgcttggaagcggcttcaagatcgaagtcctgcagacgcttcttgatggcttcggcgcccatgcagccttcgaagtaatcaccgtagcggtcttccatttcacgccacaggtcgacgtcgccttccatgtcgcccggcttcaggttcttgaagcggtcgaacacggcgctcagacgctggatctgctcgtcgaaacgaacgcggatggcggccatttcacgctcggcgctgttgcgcagcttggcgcgtgcggagcccttggcttcgccttcggcctcaagttcagccagatcggcttcgaccttcttggcacgctcttcgatttccgcgttgcggcgcttctccaggttggcgatatcgttgtcgaactcgtcctgcagaccaggaagatcctcatgacgctgttcctcatcgacgctggtgaccatgtaggcggcgaagtagatgaccttttccagatccttcggagcgatgtccagcaggtagcctaaacgggacggaacacccttgaagaaccagatgtgggtcaccggagcggcaagctcaatatggcccatgcgctcacgacgaacacggctcttggtgacttccacaccgcagcgttcgcagacgatgcccttgaagcgcacgcgcttgtacttgccgcaggcgcattcccagtcgcgggtaggtccgaagatctgctcgccgaacaggccgtctttctccggcttcagggtacggtagttgatggtttcaggcttcttgacctcgccgtggctccagttacggatgtcgtcggcggtggccaggccaatcctcagtttgtcaaatgcgttgacgtccagcactctattgtcctgtctatcgattcttaatgcttaatcacgtttcatcaggctggtcgcgccgcgctgtcaggcaacgcgaccagccttgggatcactggaattcaggttcttccacaacctggtcttccttggcggccgcgtcaggacgtgcgccaatgttgaagcccaaatcgtcggaggaagtagacggatcgtcgtcctcgtccttcatgtcgatggccacgccttcggcgttgagcacttcgacgttcagcgacagggactgcatttccttaagcagcaccttgaaggattccggaatgcctgccggcggcaggttgtcgcccttcacgatggcgccgtagacacgtacgcggccgtcgacgtcatcggacttggtggtcatcatttcatgcagcgtgtaggcggcgccataggcctcgagggcccacacttccatctcgccgaaacgctggccaccgaactgagccttaccgcccaacggctgctgggtgatcatggagtacgggccagtggaacgcgcgtggatcttgtcgtcgaccaggtggtgcagcttcagcatgtacatgtagccaacggagatcggcttcggatacggttcgccggtacggccgtcgaacagcacagccttgccgtcgtcgccgaccagcttgttgccgtcgcgatccggaagggtgcaggacagcaagcccttgatggtttccggacgaacgccgtcgaacaccggggttgccaccggagtgcccggctcgcccttttcggcgccctgcggaatgtacttcttccaagcggcttcggcatccggatcaagggagatgtcccagccggcgtgcgcgatccagcccaagtgcagttccagcacctggccaaggttcattcgagaaggcacgcccagcgggttcagcatgatgtcgaccggagtaccgtcggcaaggaacggcatatcctcttccggcagaatgcgggagataacacccttgttgccgtggcggccggacagcttgtcgccctgggtgatcttacgatgctgcgcgatgtagacgcggatcatctggttcacgccgttcggcagctcgtcgccgtcttcctcggcatcctcgcgagtgatctccttgacggcgatcacagtaccggtttcgccgtgaggcacgcgcagcgaggtgtcacgcacctcgcggctcttctcgccgaagatggcgcggagcagacgctcttccggagtcagctcggtctcgcccttcggggtgaccttgcccaccagaatgtcgccggcttcgacctcggcaccgatgcgaatgatgccacgctcgtcgaggttggccaccgcgtcctcgccgacgttcggcagatcacgggtgatctcttcggcacccagcttggtttcgcgggcgtcgatctcatattcctcgatgtggatggagctcagggtgtcgtcctgcacaagacgctgggagatgatcacagcatcctcgtagttgtagccgttccacggcatgaaggcgatgagcaggttcttgcccagtgccatttcgcccttctgggtggccggaccatcggcaagcacggtaccggcttccacacgttcgccgtcgtggatcagcggaacctggttgtagcaggtggtctggttggaacgcaggaacttggccagcttgtaggagctggtggtgccgtcgtcgttcatcacacggatgatgtcggcggaaacatacgtcaccacacccggcttctcagccagaatgacgtcgccggaatcgacggccgcacgccattcggcaccggtgcccaccagcgggcgctcggattcgatcagcggcactgcctgacgctgcatgttggtacccatcagcgctcggtggccttcatcgtgctccaggaacggaatcagggaggcgccgacggaaaccatctgacgcggggaaacgtccatgtagtcaacggagctgacgggcacatcgactgcttcttcttcgccgactcgggcaagagcctgcttcttgacgaagttgccgttctcgtcgagttcctggttggcctgtgcgatcacgtgctcggcatcgcggtctgcggtcatgtattcgacctcgtcggtcacatggccattgatgaccttacggtacggggtctcgatgaagccgaacggattgatacggccgaaggttgccagagaaccgataagaccgatgttcggaccttcaggagattcgatcgggcacatacggccgaagtgggacgggtgcacgtctcgcacttccatggatgcacggtcacgagacagaccgccagggcccagagcggacagacgacgcttgttggtgacgcctgccaacgggttgttctgatccatgaactgcgacagctgggaagttccgaagaactccttgatggtggcgttcaccggacgaatgttgatcagggactgcggggtgatggcctccggatcctgggtggtcatacgttcgcggaccacacgctccatacggctcagaccggtacgcagctggttctggatcagttcgccgacctggcggatacgacggttgccgaaatgatcgatatcgtcgacgtccacgcgcagatccacatcctggccgtcacgcttgcccgggaacttggtgtcgccggcatgcagggtgaccaggtacttgatggtggagatgatgtcttcgcgagacaggctgcgatcgttgacatccttttccagaccaagcttgcggttgatcttgtaacggccaacgcgggccagatcgtaacgcttggtgttgaagtagaaggaatccagcaggttgcggccagcttccggcgtcggggtgtcggccgggcggatcttgcggtacagatcggtcagagcctcgtcctgggtctgcacggtctccttggcaagcgcgtccataaccagcgggtaatccctgaacgcatcggcgatctcatccttggtcatgccgatggccatgaggaacacgatggcggactgcttgcgcttgcggtccacgcgcacgccaagcacgtcacgcttgtcgatctcgaactcaagccatgcgccacggctcgggatgatcttcgcgccgaagacttccttgtcggaagtgcgatcctggctgcggtcgaagtacacgcccggagaacgcaccagctgagacacgatcactcgctcggtaccaccgatgatgaaggtgccgtgcggggtctgcagcgggaaatcgcccatgaacacggtctgggacttgatttcgccggtatcgccgttttcgaattcagcgttcacatacagcggcgcggagtaggtgtaatccttctccttgcactcctgcacggtgtggcgcggttcttcgaaatacggatcggagaaggtcaggctcatggtctgagcgaagttctcgatcggtgagatctcctggaagacctcatcaagaccggaggtgtggggcacggtgttggtgccgttcgccagatcctcctcgacacgcttctgccagcgctcgttgccgatgagccagtcgaagctgtcagtctgtacacccaacaggtagggtacatcaatgggctcgcggatggagccgaagttcacacggtccgacgccttgtgcagatcaatatcgtgctggtcggcgcgtgcgatgatggtggtggtgttcgtcgtagcctcagccaatggacgttccttatcgctcgctaaatcgtttcgatatgtttccccggaagcgctcccattggccaccatatgcctagtacgcgggcgcttcttccttgtcagcgtgcccgctatatgacacgcatgtacgcagagtcatgagaataacatatcctatagatttttattcaatagtgacgccgaccggatcggacttcgctttgggatgcccttcaatcgaaagctgcgccgaatacacgccacgatccaccttcggcagggtggattgatcctccacgcattcgctgccagtacgcgttcccggccaggtgatcgtctgtttgacctcgtcgcccttcgccaacagacgatagtcggtgtcaacggggcacacattcgacttccaaaccacatcatcgcccgatttgatcgtcaacaccacgctggaagccgacacatcaaccaagcaaccaaccttgctggaaccgtcatatttgacgtccgtagtgaaatccatcgaatcgcccacaccgaaacttgacgccgcaggagtcaacgaaagcgcgacattggacgcatcgcaatccggcacaccgcttttcttctccttggtcggggacggcacttccttacgggaaatcgcatacacgtccgcatgatgaatctcacgattcaccgcgacaatccccctcgacagggagtacaggcaaaacaccagaaaagaaatcagcactatcgcagcgatgccgacgacgatgcgacggcgacgaaatatcgcctgctgttttttcgaacgtttcttgccggatttcgaggacgtcttctgtgccatgatttcacagtctagcgtgcgcacatccaaagaacgtcggcattcttcctttcataccggaagacgcacatccgcattcggcaggatttcgataagaccatcctcatccaacgatgcgatgcaccgatcaagttggatatggtcgtcccacagtcgttcaagcgacttgcgattaagggcgatcgcaccttccggcagattgcgcagcgcattcagcaccagcccacgcacctgacgatccgtaccttggaaacgttgacgcggccgcgtgcgacgttcccccaatcccggacgaccattatgcaaaaacacgcaatgtcccgaaacagggcacgcctcgcacaacggagcctttgccgtgcagacggtcgcacccaattccataacggactgattccacaccactgaaggacggtcgaaccgtctgcattttgaggcatcatcctgcggcaacatctgcttcgccaacgcacgttccgcagggcttgctgcgccgccaagcgactcctcgccaagaaaaaccctcgaaagcaccctgcgaatattcgtatccaccaccgcgatgcgctcaccaaacgcgaaactcatcaccgcgctggccgtataatcgccgatacccggcaatgccagcaactcatcgtacgtacgcggcagcttgttatcgtaatcggaaacgaccacgcgggcgcattcctgcaatcgcaaggcgcgtctcgggtagccgagcctgccccaagccgtgatcacatccgctttcgcggcatcggcaagcgcgaccgcatcaggccagcgttccatccaatcgttccaatacggtaccacacggctcatctgcgtctgctggctcatcacttcggagacaagcacgccccacgcagtagtgcggccgaaacgccatggcaggtcacgcgccgaagcatgccaccattcggcaagcgcgtccgccacagcttcggcgttttcaatttcggtattaggctcgttcgtgtcgttcatcgtacctattcttgcattcatgacgaacgaagagcataccaatgacgcgcaaggcgcaaccgcagaggaagccaaagtcgagaaaatgttcgaatacggctaccgcaagtcgaattatgggccggacgaactcgtgaccgacgcgcacggcaatccgatttccgtggtcgacgcgatgctgtcagccgaagacgcggccaaagccgaaacctccacgccccacttgtgctactactccccccgcattccgggcaataccggttcggcaatccgcctatgcgcggtgaccggcacgattctgcatttggtggagccgctcggattcaatctgcgcgatacgaaactgcgtcgtgccggactggactaccacgacatggcccacgtggtattgcacccgaattttgagaatctggtggaatccatgccgaattcgcgcatcatcgcgttcaccgcgcacgccaccaaactgtataccgacatcgaatacaagccgactgacattctgctgttcggcccggagccgggcaatattcccgatccgatggatattatggccggtccgcacgtggccgaacaggtgcgtctgccgatgcgtccaagcctgcgttccctgaacctcaccaactgcgcatccatcgccatctacgaagcctggcgccaactaggcttcgtcggcggccagtgatccctcccctgcctgccaacttctaggttttccaataatttgcttgcttttgtacaacaagttccgcgggagagccccgacacgctccaggccgctcaggccaagtctttacggtctgaaacagaccccgccgcctctcccgctacgctgagttcaacttaagtaagttttcttttcttttctgcaagacacaacgagatgtacgaaagcgagcagaagagcgggatattctgttcgagaccgtaagcttggccgaacggccttgagtgtgtcgcgaatagaatatcccgctcttctgcgacctccccattacagcaacttatgcacccaacgcaagcacaaatcgcaagaatgaatcgcacgcgacaagcatgcatcgggaagggggaagggagggactagtttttgaagctgtggattggggcggggatgcggccgcctcgggtcacgaaagcttcgcagctggtctggttgactggaatgatcggagcgtagcccatcagaccaccgaagttggccatctcccctacgcctttgccttcaaccggaatcacgcgcacagccgtggtcttctggttgaccataccgatggcggcttcatcggcgatgatgccggaaatggtggatgcggtggtgtctcccggaatggcgatcatgtcgaggccgacggagcacacgcaggtcatggcttcgagcttttcgatcttcaggcagccgttggttgccgcgtcgatcatgttcttgtcttcggaaaccggaatgaatgcgccggaaagtccgccgacgtaggaggacgccatgatgccacccttcttcacctgatcgttgagcatggcgagcgctgcggtggtgcccggtgcgccgacctgttcgaggccgatcttttcgagcacttcgccgacggagtcgcctacggccggggtcggtgcgagggaaaggtcaatgatgccgaatggaatgccgaggcgacgggatgcctcctgtgccaccagctggccgacgcgcgtaatcttgaacgcggtgcgcttgatggtttcgcacaggaattcgaagtccttgcccttggcttcgtcgagtgcacgggaaaccacgccggggccggaaacgccgacattgatgaccgcgtcgccttcggttacgccatggaagccacctgccatgaacgggttgtcgtcgggggcattgcagaatgccacgaatttcacgcatccgtaggaatcgttatctgcggtggcatgtgcgatgtctttgatgatgtggccgagcagttcgacggagttcatgtcgatgccggttttggtggatcccacgttgacggacgagcagacgatgtcggtttcgctcagcgccttcggcagggagcggatgagcagctcttcggcgggggtcatggatttggatacgagagcggagtagccgccgatcaggtcgacgccgaccttcttcgccgccttgtcaagcgcatgcgcgattttcacgaaatcatccgacgtcttgcaggagcttgcgccgaccaacgagatcggggtgacggtgatgcgcttgttgacgatcggaatgccgtagtcgcgttcgatggctttgccggtggatacgagatccttggcgtacgtggtaattttgttgtagatgttgtcgcagacttcgtcgacgctgtcggccgcgcagtccagcaggctgatgcccatggtgatggtgcgtacgtcgagcttctcctgctcgatcatcttgttggtctcgtggacctccatgatattcagcatgatgtgttccttcgctccttaccgatgaaccctgatggatcagacgcggtgcatcttggtgaagatctcctcgcgctggcagcggatgcgcacgccgatctcttcgccaagcttgtcgagatcgtccacgacctcgccgaattccttgtcagcgttggaataatccacaatcatcatcatgttgaagaaaccgtcgatgatggtctgggaaatgtcaagcacgttgacctgatgttcggaaaggtatgtgcagacgcgtgcgatgatgccgacagtatcctgaccgacgacggtgatgattgccttgttcatggaactccctaaacgttaggtgcgaatatccagttaccgtctcggcgagatgccggacgtaccttaagtataagaaaggtagatgtcaaaaaaggcgtttttccggcaatcacattacattgtgagacgatttcttccgtcaaaccggtttcaaaagttgcggaaagtcgttttttggaatatctgttttcgacgtgaaatcggatttcataaaagaaaagcgcctgccgatcgtttggaaatacgaattcggcaagcgctttttacaatatgtcatgcgatttacttttcgctgatcttgtcttctttcaggaagaaggagaagaccagcacgatgatgatcagcactaggccgaacaaatagccgtagcgggatcctgcaacgaagccttccgcgtcggtggcaccggtgctcatcgacagcagacaggtggcaatggacgtgccgatcgcgccgaatacctgctgcatggtgttgagtatggtgggcccatcggcggcttcggcacctcatcgaaccagccgtatctgacctacggcatcgtgcctgccgaccatcgtcgtgggatactttgtgcaccattcacaagtaaatcatgcagaaacgcgcgttggcgcacgtccttttcatggacgtgcgccaacgcgcgtttctgcatcagcttctgcgatcaggcctcgcggctcgcggaagccgcagcgaacgccggcaaggcgcgaggtgcgttgaaaccttccttttcgaagcggtcagcaatcttctgtgcgatttcgtggccctggcccttgtcgaccagcgcgatgatggatccgccgaagccaccgccggtcatacgtgcgccgtatgcgccattggcacgagccacgtccacggcaatgtccaactcgggcacagtcacttcataatccgcagcgagcgaatcatgagacgcgttgaacagtcggcctgcttcgtcaatcttgccgttggcgaaggcacgcacgaaggagttgacacgggcgatttcggtgatgacgtggcgcacgcgcttcttcatcgtgtcgtcttccagcttatcgagcgtttccttgagtgcctggaacggatcgtcggacttggcgatgctgtcggcgaccacacgcaggttggccacgccgaggatttcagcggccttctcgcaagtggcgcgacgctgggcatactggccgtcgttgagctggtgcggagcctgagtgtcaagcaccagcagttccaaaccgtacttgtcgagatcgaattcctgctgggagacgttctccagcgggctcagctctggacggcaatcaagacgcaacgcatggccgaaagtgcagcgcatggatgcgttctgatcgagcccaccggtggacgcgcccgccatgtcgttttccgacttgatggcggcgttgatcagcgtcacacgaccggcgtcggatgcgccataacccaaaccgtacacgtcatccagcgccaaggcggtggagcaggtcatggctgcggaggagctcagaccggagccgagcggcacgcaggaggaaaatgccgcgtcgaagccctgcaccgcgtcgaagccggcttcgcgcaatgcccaggccacgcctaccgggtaggcggcccatccttccacaccaccggcctgcagaccgtcgaggtcgccttcggtaacgttttcgggggaaacgtcggaaaccacgcgcaccttggtgtcttcgcgcggcttgagcgcgatgaacgtgcggtgcggcagtgcgatcggcaggcacaggcccgcgttgtagtcggtgtgttcgccgatcaggttcacacggcccggggcggcccatacaccagccggttcctccccgtaggtggcacggaacaggtcggtcgcgttcttcacgccctcgtcgtgcgagagcggctcaatgaattcaacagcagtcattggtgttttgtcctttgggttttggtggctttcagctttcgatgtcgattggtccgagctcatggaagcgcttggcgatgagttccggagtggtatcggaaacccatgcggccatgccggattcggatccggccagatacttgatcttgttggctgcgcggcggaacgagaagaactgcaggttcaggcggtagttctcacggcgtgcgtcgtggatcggggcctgatgccatgctgcgatgtacggcagatccatgcccttgccgtcgcccttgtcgaagaacgcgttgccgcgcttgagcagggtggagtacatgacggccagatcccaacgttcctgatcgttgagctcgtcaagggtgagtacgtcgcgcaccggggccacatgtacctcgaggggccagcgggctgcggcaggcacgtaggccacccagctgtggttgcgcatgacgatgcgttcctcggcttcgatttcggcgttcatgagatccttgagcaggttgccgccggtcttctcatggtaggcttcggtctgcttgagttcggcttccatcttcggtgcgatgaacggatagcagtagacctgtccgtgcgggtgcgccagggagacgccgatttcctgtccgtggttttcgaacgggaaaatctgttcgatgccttccatcttggagatttcagcggtacggaacgcccatgcctccacgacggtgcgcaggcgggagaccggcaggtcagccggcagaccatcttcgtccgggtcgaagcagatcacttcgcaacggcctgcggcgagcttcttttcccacaacggattgccgttgacgtattccacggcttcggaacggcccggcacgcgaaccatggacgggaagcggttttcgaacacgaccacgttgtagtcggtgtccggcacttcgccgtcctgatacgggtcgcccggcttgcgtgcggccagcgggttgcctttggcggtggcgccagggcccgcggtgatcggacggttcatacgtgcggtcgccatcggaatccagtcgccggtcagtggatcgcgacgcatttccggagcagcgtacggcacttcctcaccggctgcgttgagctggttggagaaacggtatgccagctgacgaggatcgttcagttcgcgcgtcttcgcgccggaaacgtattccggatcatcgtcgaggtagaagaaagcgcggccatcggcgagcgtggtcggcgtgatgcgaatgtgctccttcgcgtactctccgggagtgtagtttgcgaattcactcattatggttattcaccttcctgaataggctcgctctggtgtgccagcacgagctctttaaccaaatcccttgttttcccaaccgaatcggggtctagtccatcatcggtaatgaccgtgtccacctggtcgaagcgtgcgaaaagcgacaatgatgtgcagctccacttggtgtgatcggtcaaaattatggtgcgatcggcaatgtccatcattgccatatcggttgcggcctcaagcgagttcggcatgaggaagccgcgcggaatggacacggaatgcgtgcccaggaagactgtgttgacgcgcagggaggccaccactttgtctgcgatcgggcctacgagcgagttggatcgggtggtcacgccgccggtcacgatgacttccacgtctttcgattccagcgcctgcaccagttccgccaccggaatggagttggtgaggatggtgatccccgacgactgctgtgattccagcagatgttgcgcgaatacgtatgcggtggtgccgccgccgatggcgatcacgtcgccgggtgccacatatttgatggcttcctgtgcgatggcgtccttcaatccgatgtccatctgcgactttacagagaacagcggctcactcagcagcgtgctggtagtgacggcgccgccgtgcacacgcttcagcagacccttgtcggccagatcggcgatatcgcgtcggatggtcatggcggaaacgcccaattccttggacaatgcggtgatacgcaccgcaccgcgggtacgcaacctgctcaaaatcaaatgctgacgttgtgacgatatcattcgaacattatcgcacatgttcactcaaaataaaaactgagatgagcgtttcgcgcgttttcctcacgaaaaaatatacttggcactcctgtaatcgttcaaatcgaacaaaaacgaacgtcgacatcccgtcagcgaaatcaatcgtcgtgttgctttcctgcgacaaacggtgcgagaatagtgaaccatgacgtatgtttctgagaatttctggcacgatgcggtgaacaaagccaccaccgatctcttcaccttcggctataagcacatcatcaagccgcatttcgtattcaatcagacgcccgatgtggcgcacgaccagatgatccagttctgcaagatcaccaagaacattccgccactgatgtgggcgtgccgtgaaatgctcaactattccgaccctgtgctggaaaccagcgtgatgggcgtcgacttcgtcaatccgttcggcctttccgccggcctcgacaagaactgcgagatgccggtgctgctcgacaacgccggcttcggcttcgaaacggtcggatccaccacgtctcgtccgtgtcccggcaatccgaaaccgtggttccaccgtctgcccgaatatgattcgatgatggtgcatgtcggtcttgccaatgagggttcggaaatcgttgttccgcgcgcggaacaggcttggacgaaggcgcgcgatatgcagatttccgtgtcgatcgcgcgtacgaatgacgataagaccggcgatttggacgaaggcatcgaggattactgcatttcgatgcgccgcgcggccggtcgcaccgccatggtcgaagtgaacatctcctgcccgaacacgatggccggcgaaccgttcaatcagagccctgaagcgctcgacaagctgttcaccgaactcgacaagatcgaacgtccacagcccacgctggtgaagatgccgttgaataagtcctgggaagagttcaaggatttgcttgacgtgcttgccgaacacaatgtgcagggcttgtcgattgcgaatctgcagaaggaccgcactggcatggagattcctcgcgattgggagggcggactgtcgggttcgccatgctatgaggccagcaacgaacgcatcaagcaggtgtaccgcgaatatggcgaccgttttgcgattgccggcatcggcggcgtgttcactccgcagcaggcgtatgcgaagattcgttccggctcgtcgttggtcatgttcatcagctcgctgatgtatcgcggaccgcagcagatcaccgtgttgaagcgcggccttgccgaactgctcaagcgcgacggattcgaccatgtgagccaggctgtcggcatcgacgcctgataccgattatttcaatcggcagcgagcaccaaataataatgcgccctgcgaccgccaacgcggtgcagggcgcattattgttgttcgattgttgttcgatattaccttggttattggttgcgtttagtatgcgccacgcacatactgcggctggtagggcgcatcttcggtcggaataccgagcttgtgggcggcgcgaagaggccaattcggatcacgaagcgccgcacgtccgatttcgatggcgtcggcggcaccggatttcaaaatcttcttggcctgcttcggcttggtgatcaatccgacggccgtggttggaatttcggcacgcgagcgcacctgttcggcgaatggaacctgataatcgggtttgacgggaatggtcacgcccggaatcatgcctccggtggagacgtccatcagatcgacgccatgctccttcaatactttggcaaggtcgacggtctggtcgagatcccaaccgccggcagcccagtcggttgcggaaacgcgcaccagcatcggcatggtgtcgggcacgacggaacgcacggcgtccacgacctcgaccagcatgcggatgcggttttcgaacgatccgccatactcatcctcacgctcgttgatcagcgggtcgaggaactgcgacagcagatagccgtgggccgcatgaatttccaccgcgtcaaaaccgatatcataagcacgccaagcggcatcgcggaactggtcgacaatggcatggatctcgtcaacggtcaacgcgcgaggcttggtcagcgagccgaacgcgttggcgcttggccccacggtcttccaaccgccctgctcctccggcacgctctcatgctcgtatccgatggagaagcagccggtggaagccttgcgtccggcatggttgagctgcaccgccatcgtcgcgccggcggccttcgcatcggcaacgatccaacgccacgcgtccatctgctcgtcggcccacaatcccaagtcgcacggcgaaatacgaccctccggcgccactgcggtagcttccacgataatcatgccgaaaccgcccatggcgcgtgacacataatgctggtagtggaatggcgtgggcagaccatcctgggccaacgcggaatacgtgtccatcggcggcagccagatgcggttgcgcatggtcacgccacgcaaggtcataggatcgaacaggccaaccgtgccattggttttggccttcttcgactgcttcgtcttcttttcgtattcgctcatcgtagtagctcccctccggtcgcgcctactggcttcatgccgatcagctgaaccttcttttcgtattccccttgagcttctctggagatttcgtgccgtagaaccggcactatctgcattctacgcagaacgcccgccgagcatggcgggcgttcattgattgttcacttccattcactgaattacggaagcgtcactcatcttcggtctgctgctgatcctgatcagcctgctggtcgttctgctggctttgctgctgaagcgactggttctgctgctggatgattgtgctttgctgctgtgtggcattctgctttccaccgccgatcttggtgaccgcgctggatgttgcggaatacttggccgcaggctgcccataatcgttatcaatcggcagctgtttgcgttccgcataagcattcataaagtcacgccatgccggggctgcgatggtggaaccatcccagtagctgtggtattggccgttgatggcgatattcgcaatcgggtggccaaccgggttctgcacgtcaccgacgagcacgaacgtagcgatctggttcggaatgaaaccacctgtcgtaactagctgatcctcgtgggtaccggtcttggcgaaggtcttacgtccattggccagctgtgccacgccgcctgcgccgtcgggacgaacaacgccttgattcatggcccaagcaagcgtttggatgatttccggatcgaccgcctgatggcagttcgcggaaggcaccttaatatcattgccatccacatcagtcacctgcttcagtgcgatcggatcgcactgcacaccattggatgcatatacagcgaagatgcttgccatcgtcagcggggacacgttgacgttaccgaccatcatagcaggcacgaatgatgcggtcttgtcgagcgtctcaccggtattcgcatcatgatagccaagttccgttgcggtatcggcaatcttgcacaagccgatgatggatcccatggaagcctgcgtggtgttgtgagaccttgccaaagccaatgccggcgtttccgggttcaccgttccattggtgattgcgttggtgacgttccacgtatcagtgccaccggtataacgatcgcatgcgaacaacgaggtcgaatacctcgtggacgtctgcaggttctcgttgacggaatgtcccgcttccatccatgccaccagattgataggcttccacgacgagccgatggagaagcccatgccgccgccgtcttctcggtccacggcatagttcatggaatccctggtctggtcgttctgcgccgcttcggtggcatcatacgttcggttcaggccgaagcccaacacttctccggtacccggtttgacggacgccatcacgatttccataccggaggaatcttccggtggaatggtgttgcgcgcggtttcgttcaacaaggtgttggcatcgatatccagcgtggtgacaatcttcagaccgccctctttcagcagtctttccctgtcctcgctggtcttgccgaattccttggaattcaaaatcttatgcaccacgtaatcgcagaaatagcccgcatcatagtccgcggccatgcaaccggtggaaataggctggacatcaagcgtatctgcgagcggagtattgaccgcctcttgatattccgcatccgaaatatagccctgctcgttcatcagctgcagcacgatattgcgttgcttctcggattccggctggttcgattcgacagaaggatcgtaagcgttcggattcttggtgattgccgcgatggtggcggactgcacgatgttcagctgatctgcggtggtgttgaaataccgcttcgcagccgcctgcacgccatagaggctattgccgccaaactgtgcgatattgagatatccctgcaaaatttcaggcttggaatactgcttttccatttgcacggaaatcagcatttccctcatttttcgtgcgatggtatcttccgacgcatggtattgtgcgatcggatcatcatcctgctgcgcctgcaggatcagcacgtttttgacatactgctgggtaagggaggaaccgccctgatggtcgcccttcatgtatgtttggacgaacgcgcggaacacaccctgcacatcaacgccgccgtgagtgaagaatcgtctgtcttcacgcgctaccacggcctgctgcatgtattcggaaatcttcttcaacggcacgacttcacgattctgatcccagaattcggtgattttcgtggtgccatcggaagcgtacatggtcgacttctgcggcaggctggtcacatcaaaatcaataccttcgaccgacagcgacggaataaccgccttggcgacgctgttcgcgccgaaaaccgccggtaggaggaacaaactggcggccacgccgccacccacactcagcgtgatgtaggcaatcacgagtgcgagcacacgttgaacggtcaaagtcttcttttcgggcatggtgcccattctaaagtggtgggtctactaatcaaccggccgatcgcagccatcacgggtttctcacaaaaaccgtaaaactttaaaaacgctgaaaaatagccgaaaatctatcgtcgcgaacggcggatcagcatgccaggctggtagatgatgatggaacggccctcacgcgcaatccatccacggttagcgaaatccatcagcgccttgttcaccgtttcgcgcgacgaaccgaccagctgcgccatttcctcctgcgtcagatcgtgcggcaccttcaaccccgcctcgactggctcgccgaaacgtgacgccagattcagcagcgttttcgccaaacgtcccggcacgtccatgaacacaagttccgaaatgcgctcgttgttgtcacgcatgcgatgcgcgagcacctgaagcatgtcgacggccacgcgtggatgctcgtcaagccatgcgaacagggcgtcatgctcaagccatacgacttttgtgtcactggtcatggccacggcggacgcggtgcgcggcccaccgtgcggatcgaacaccggaatctcacccagcacttcgccgtacgcatgaatgctcaacaactgcacacgtctgtcggacgattgccggatcagtttgacgcgcccgcgttccagcagatacatgcggtgatcggtgtcgccttcgcggaaaatatagtcgcccttgttgtattcggcatgctgcagatacggcagcagttcctccgcctcttcggaagaaacctgcttgaacaacgcggtgtgcagcaacgtcgcgctttcgccactgggtccactattggtctcgtttggcgtagccatttgtcacacctccgttcataggcacatcctctgggaacgccgccaagcgtgttgccgggcgcgctgccgcggcttcaaaagcttgctgcgattccacatgccctcacggaacaccaagctttcgtaacgttctcatcgcccttgacattagggcgacttcgaccatcgggctatattgtaactcgctcagcagcggcgagcagccgtttcactacatcgtcgcggctcataccggtctgtgagcgcattggatcgactcgttttaccgctgatttcaccgctttgtccgacattttctcgcgcgaggtgttcaacacgcgcgccattttctccgcgtcgatatcgtaggcaagggtcacgtggtgcagtatagcgcctggacctccgtttttcggcgcgaatcggcgttgtgcggctccgccgagtttgccgtattgcgtggcgatgtcgttgagtccggagaagcgtacgtcgaggccaagttctttcaacgcctgaaccagccagacgtcgcaaagcctgtatgattcctcgatgcttacgccttgggcgaagtcgagcggcgcgtacagcgagtaggtgatggtgttgcccggttcgatgaacatcgccccgccgccggtgcagcgtcggaccacggtgaagccttcctcttgcgcgatcgccgcgttgacttcgtcttcgagcgactggaatttcccgatgaccacggccggagcggcccattcccagatgcgcaacgtgggttcgcgttttcctgccgccacttcgcgcgcccatgcgatgtcggtttccatttgttcgttcgggtcgcgcggcttgtcgtggatgacggtcggtttcaggtcccgccagcgttccagatattcctcttgtgtcagcgcattatgcattcccggttgttccccggaatattgtttcgtggaccgcgcgatattcccattgttcgttgcatcttccgcattgcgcgattcactgcctgtgattgcgcggaggaaagcgatggcaataccttcttccgtcatacccaccaatcgcacgttcggatagttcgcggtaatcgcttgcaatcgtcgcgtaatgtcgcgtgcgggcgcgctttgctggctttgcagcaagttttccaaatcctgcaatagtcggcgggaatccttgtcgtcgccgtcaagaaagaaatcgccgtcgatccggcattgttccacggattgggcggaacttgcgcattcgcgggaatatgctggaacggcatcagaaagccggacggcaacccctacgagtttgccacccggctgcttgtacaggcctctgcccatcaatcttggagctcttggccgtgcccatcgcggtgccagttggacccgtagctggagcacaggatgaggacggcttcgatcagagcccagattccggaaatgatcggtccgataaggatgatccatccgatcagggtcagcaacagctgagccacggccttgccggtgtatcccagatagaagttgtgcacgccgagggagccgaggaacaggccgagcaggcctgcgacgatcttcgacttctgcgcgtagccatagccgggctgctgttgggccgcctgatagtaggcctgctgtgcgtaggttgatggctgattgtatgcggactgcgtgtattggggctgagtcgactgctgataatagggggtctgcgccgattgtgcgtaatccgtaggtccgtacgtcggctggccgtagatgggctgtgcaggttgcgcaggctgggtcggctgcccgtaagcgggagcgtccgagccatatgcggggacggacgaaccgtaggcagccggctgaccatatggctgggcattgccatacgtaccgtcggggatgttgttgccctgcacgtccggggcatatccctgcgcaggctgctgcgatgcatactggttgggattgtacggttgcgctgcaggctgattgcagccatcctggaattgtccgaaatcagcttgggccgaatcattcgaaacgtaatagttgtcctggccggaaccgttgtaatcggcattgttgtcactcatggcttcaacaatatcccataatttgccttatttctttcatccaccctgaaagcaatccctgaaatccccctgaatatgcgaaacgcctgtcgaattcaagcgtgaactcgatttcgacaggcgtctcaacaggcgaacatatccggcgcaatcatgcgttccggatcatatgtcacatgcgtgccagaatgtcgcgtccgacctcgtcggtggagcgggtggtggatcccagttcctcaatgtcggcttcgacggccgcatcgatcttggctgcggcttcgtcgaatccaaggtggcgcagcagcatggctgcggaaaggatcgcggcggtcggattggccttgttctgacccgcgatatccggagcggaaccgtggatcggctcgaacatggacgggtattcgtcggaagcgttgatgcatccggaagcggaatagccaacgccaccgaccacggcaccggcctcgtcggtgatgatgtcgccgaacaggttgtcggtgaggatcacgtcgaaacgggacggattggacaccatgaagatggtggtcgcgtcgatgtgcagatagtcatgggagacttccggatattcctcggcgaccttgtcaacgatgcgctgccacatgtcgcccgcgttgacgagcacgttcttcttgtgcacgagggtcacatgcttcctgcgcttcatggccagctggaaggcgtaacgtaccacgcgctccacaccgtaggcggtgttgatggagacttcggtggccacctcgttcggggtgccgcgacgcaccgctccgccggcgccgcagtacaggccttcggtgccttcacgcactacaacgaagtcgatgtcgcccgggttggcgagcggggaggtcacgcccttgtacagcttggaaggacgcaggttgacgtactggtcgagatcgaagcggagcttgagcagcagaccacgttccagaatgccggccttgatgcgcggatcgcctacggcgcccaacagaatcgcatcggtcttcttgatgcgctcctcttcctcttccggaagaatcgcaccgtcgcgcaggtaacgctcggcaccaagatcgaaattctcgtaatcgaattcggcgacgccctcggccgccttctccagagccttctgggcccacggagtcacttccttgccaatgccatcgcccggaatgacggcgatggtgtacttctttgcagaatcactcatagcacgcgactctagtcaacggaccagcacgtggacttaaaacgctcaactaatggacactccatgccgctttcctgtacgaaacacacgaaaagcatgaatcatacgaatctcacaaatcgcacagcctaatcagctggtaatacccatcacgccaagacaccaagcattctcataggagatctcctcccactgcttgtaccttccagacgtacccccatgaccagcctcaacctcaatcttcgccacggcatccacgcccgcacgctgcagtcgggccaaccatttcatcggctccacatacagcacacgagtgtcattcatcgacgtggtaatgaaaatcttgggaaaaaccgcaacccgcgcatcatttgcatcagacggcgcattctcatacggcgtatattccttcatataccgatacacgtccgcattatgcagcggatcgccccactcatcccactccgtaaccgtcaacggcaacgacggatcaagaatcgacgtcaacgcatccacaaaaggcacatccgcctcaacgcccgcgaaacattcgggagccatattcgccacggcacccatcaacaggccaccggcggaaccgccatcggccaccgtgcgagcaggcgacgccaaaccggcacactgcaacgcacgcacggcatcaacgaaatcctcaaacgaatgcttcttattgagcaaatgcccctgctcataccaagcacgacccatctcaccgccgccgcgaatgtgcggcaccgcataaagcacaccacgatcaagcatgctgatgcgagacaccgagaatcccggatccgaactgatctcatacgcgccatacccggtaacgaacatcgccgaatcacacgcaggcacatccctgcgccacaccaaggaaacaggaatgcgctcgccatcgcgggcggtaacccacaccctgcgctccatgtattcgcgcggttcaaatccaccaagcaccgtggcacgcctcaacaggcgatcctcgccggtcgccggatcgatatcatgcagttcgccgggacgcgtgtaactggagaacgagtagcgcatgcggggcgcatcatacgaaggattgcctcccacaccaatcgaatacaagcgccgggtctcccccggcatcgcatcggcggtcgcaccatccgatgaggtcatcgccttgcgggaaaccccatgcacggccgacccctcgccttgcgcggcggccaattggtcgagcgcgccccacacttcggcacgttcctcgttgatctcgtccaccgactcgtcgacatcccaatcgtcttccaacgcgtggggaaccagctcggtgaacttccatggacgccccgcaagaaaatcctccgcagcggcatccttcgtcatcaccgcaatatgcgtcaggctttccgcccggtactgcagcgccacataatgccggtgaatcgagatcccctcaatgccaagaccatgcgcgccctgcaaaatggctggattgcagggattggaatacggtgtgccgatcggcatctcagaagcgcccggttcgacctcgtcgccgtgctcgcatccgtacggcgaaccgacggccacacgcacgccctcacccaaacggtacgggggctcatgggagcgcatgtcgatcacatcgatttcgaaattcgggttcaacgcattgtgatagaccacggcgagcggaatatcctcaccgcgttcgccggcaccttcgaaacggctgaaactcacgtcgtattccacgtcctgctcgcgcggaatgaacgcgcggaattcgccttccggatcgtcggtggaaagcagcagcacttcggtggtagtcttcgacccggtgccgatcaccagattgcgttcgtcgaacgacaggccgatgccaacccagaatcgttcgtcctgttcgcggtacacctccacatcgtcgacgatgggagtgccgacgcggtgcctcatcaccgcgtatggacgccacgcgtcgtcgagcttcacatagaacacccattgcgcgtccggtgtgaagcaggcgccaccgatgccctcgaacacttccggcagttccttgccggtttccaagctgcggatgcggaaatcgtaacgttcgtcgccgctggtgtcgatgccgtacagcatccaacgtccgtctttggaaatatccatgccgccgatacggaagaaatcatggccttgcgcttcggcattggtgtcgaacaccacttgttcgccgtcgatgggcacgccgatttcaatggttggcggatcccaatcgtctgcgcctcgaataggcacacggcattgcaccgcatactgctggccctcctgggtgcgtacgaaataccagtagccatccatgcgtgtcggcacggacatgtcgttttcctgaacgtgcgacttgagctcgtcgaacagtgtggagcgtagggttttcaacggttccatgcgctgctcgcaataccggttctgcgcggcgacgtaatcctgcacgtcatgcgattccttgtcgcgcagccattcgtactcgtcgatgaaggtgtcgccgtggaatacgcgctccttcggcacacgcttcgcgatcggcatcccgcatttgtcttgcacgctttcgtcgctttctcgcgcgcccgttgcgccctgttcaccccgaaaatcagtcatgcacgcgattataccggcattgcattcccaatcccacgcggcacgcaccccctgctccgggcgtacgaaaaagtcagacgcccatctgttgtttcaggaacggcagcatggttttcatcagattcgagccggtcgttcccgtgaataccgggacatcggtgaccgggatcggctgcgtgaccgcacgccccgcaacggtgccgagattgccggcgacttcgcgtggagacaactgccggatgccgatcgccagcacacgccctgggtatcggcgtgcgatcgtggcgtacgtggtcggatccctctgcccgtcatcgccgatcagaatgaacttcatatcaggaaaatcagccatcaattgttcggcatactcgagtttgtgctgcactccggaaggaatgaacgttttcgggcgaggatcgaggtcgcgcaatagcagcggaccttccggaaaaccatggttggcgatgaaatgccggatcgagctttccacattccatggagatgtcgacaggtagaagaacggcgcgtccgggaacatgtccgcaatgcggttgaacagcaggttcatgcccgcaaccggcattttcttctttggatcgagcagcagcagattgtaggcggctttcatcaggcttggcgcctgcgtgaccatgatggtgtcgtccacgtcggagatcacgccgactttcgtaccgctggggatggtgaacaggttggctgtgactggtttgcggctgcgtaccttgtatgacacgtcgtgcacgcccggttcgagcgaatgttcggccacgagatcgagatatcctgcggaatcggaggctgcgaattcactggagacattgcgctgcgcgtccacttcgtcgtgcacttcggacgcgcccacctgcacggtttcgaggggcacgccgtcgatggcgatgcgcaccttcgtatgcggcgaggggatggtgagcatggcacggatgccacgggtcagacgacccgcctgacgtttgaatggaccgtacacggttcggcagatcagtcgagagtaatgttcggtgccgtagccgacatatggttccacgcgcggataccagttgagattgagcaccatgcttgttgagaacgtcacccacttgttgaacgctctggtaatggtgcggcggaacagtcgtgtcagcggaggcttgacttcgatgcgttcgtgtttcgaagccgcgtcgaaggtggtgaccaccttgcgtgcgggaatgggcacggtcggcatgtcatcttcggatatggaatccggttcacgctggggcaacggctgcggttcggtcataaccccactataaaggcaattattgaattacctggtaccccagcgtgaaaatcagggatttttcagggaataccgatgatttcccatccaatttcccgaatcgtgccgttcactgagccacgatgttggcgtattcctcggaggaaagcagtcccggctcgtcatcctcaagttcgattttgaaaatccagccttcgccatacgggtcgcccgttacgatgcttggatcgtcggcggcctcgttgttcacatagcgaatcacgccggacaccggagcgaccagcggcgtgaccgccttggaggattccagttccaccacctcgtcgcccgcctgcacttcggtgccgacttccggcagatcgatatacacgagttcgccaagctggtcggccgcatattcggtgatacccaccatggccggctcggtggaagcatccacccacacatgctcgtcggaatattcaagatgctcaggcacatccagattcggcttgttatcgttttcttcgctcatgaaagctcattctacgtcaatcgtatgtatttccctagaacagtgccgaaacttgttacgggaggtcgtggccgagccattcttcgatcatgtagcgggcgatggtggcctttccgggagcttccatacgccctgccaccaactcgttcatgtattcgtcacgggtcacccaacgcgcctgcagggtctcgtcgccgtccacgcgcacgtcggtggtgttggccacgcctttgaacgccatcatgagcgaggctgggaatggccatggctgcgatcccaagtatttgagttcgccgatgtctatgccgacttcctctttggcttcgcgccggcaggcatgctccaggttttctccggcttccacgaagcctgcggacacggagtacagtccggtgttgcgccatgcgctgttgtgttgcagcagcagacggtcctcatggtccacgatcgccgtgatgacggccggttccactctggggaacagcagtcgcttgccatccgcttcgctgttgcagcgttgcgcccatcctcccaacgccggttcggtcggagcgccgcatgtggggcaatgacgttggcgcgcatgccatacgcccagcgagatcgccgtcgtggcctggcctgcttcgcgcgcgctggcatgcggtgcgaatccgcgcagatcgacccagtcgaatcgttccgcagcgctttccagcaacgatttcgacgctttcgcttccggctcgcgctgttcgccgaacgcatcgtccgcgcccatatgctcgctgcttgcggtcaccgtctccgcggctttcacgcgagacacgtcgacggcgaccacgtgttcgtcgcgtttgccgccatacgatccaaggaatatggcgagcgccgtcggatgcgtgtgcagttccgccgccacgtaggcgccgggcaattgcgcgagacgcatatgcacgttggcgtagtccgcgatggctccctgtccgcgcggcaccgccaccatgccgtctttgacgagaatgaccttcgtggccggctccagcagcgccgtgtcgaacaggtcgggttcgtcgcgtctcgaaacctcatagtcgatgtcaccttgcgcaagtggcaggaacggcagtgcctgagtcagcgccaatggtgagaacacgctcatcgcttgcttctttccttgaatacgattgatagagcggatattttttctctattccgtattttcttttctattctttatatcttttttgtatttctgattgcgatattgacggcagcggcggaaaataccggctactgcaccctgcgcaccagcgcgagcagcgcgtcggcaaccgcctgcggatgctcgtatgcgctgaaatgcccgcaatcgaataccaccgtcatatccgcgctcgtagccgtcatcgcatcggcgatcggcgtcatcacgctcggcgggctcgacggatccttgtcgccgcagatcaccgcaaccggtgctgtaatcgcaggcaacacatcgttcagatccgggcgcccagccgccatgcgttcacgccaggcgatgccttcggccggctgctcgttgatccatgcagtgaactgttcacggtaagcgtccgactgtttgatggtggaatcctcaggcgtggcggcggcgaatcccatgaccggctcatgcgtgcccgtcgattcgcattcctcggcgattgcgatgcgtttcgcacgcatctgttcggaatcagcggcggccttcgtgtcgcataaggccagtgcggcgacggcttcggggtgcaaacgctgaatgtcgagaatcaggtagcctcccatcgaaagacccacccaaatcgccttgtcgtatccggcagcgtgcaacaggtcgacgtaagcgtcggccatgcggttcaaaccgttggggaaagcgccgtccgcgtctttgccgccactggtctcatcggaaggaatcggcccttctcccgcaccgggcatgtcgggaccccagatcgggaaccgtttcacaccatgttccacagcggccgcctccaacgcctccgcacattcgtcccacatgcggtggtccacggggaacccgtgcaccagcaccacgggaagcccctcgccctcgcaatacacgttattatgtaattcgatcgtcatcgtctcactccgttcctctcccctatattgcctatatatctatcgcttacgctgcctgcattcacaaactgccacgcgctttcctggcgcccacggccgaccggtttcgacgccagccataagcctgtcggctacctgccggcccaagcgatcgcctgacgcacaatcgtgccatatccgttgctcatctggtttatgaaagtgtcgaggatctcgctgttcgggttgacccattccacgtcaagcgtctcatcctgcggcttgcagtcgcccgcgatcggcaccacgtagcacaatgcgatcgcatgctggcgtgaatcgaaataatcggatagtcccggcgtcgggaaaaactcggccacggtgaacggctgcagactcaccggcagctgcggcaacgcgatatcgcccaaatccttggcgacattacgcgccacggcctcacgcaacgattcgtgatagagcacgcgcccggcaatcagcgttcgctcgatactgccgtcgtcagacacgcgaagcaacgatccgacctgtgaaacacgtcccagatcgtcggtgcgcaccggcaccacaagcacgtatggaatcggcatttcgccgcgcatacggttgatttcgccggaagcaagccatcctggaggattacctattccgcgaatgaaatcctccggcgtaatgtcgtcgaattctccgcgacgacggcttgcatcgaaatcgccctcgtcgggcacttcatcattcatcactggcatagtcccattatcacgcatcttgtgtgaattggctggaaaagaatgcgccgaaagacgattcttctgacagcggatattgcatatgccgggaatgcggcgggttggggcgcagttatatactccaaagcaatcgcatacgaggggcgtagcccgtcacgcgcgtcgatggaacgaacagcaaggagcaatcatggcaacgcatgcggtcacttcgcaggatttcaatcaggtcgtcgaatccaacgatctggtattagtggatttctgggcaacctggtgcggtccgtgccgtgcgttcggcccgacgttcgaaaaggcaagcgaagcgaatcctgacatttatttcgcgaaggtcgatatcgaccagaatccggatctcgcctccgccgccaaagtgcaggccgtgccgaccttgatggtgatcaagaaccagcagatcgtattccagcaggctggcgcgttgcgcgcgtcggatctggacgatctgatcgcccaggccaaggatctggacgtcaatgcggccgctgccgaagaggctacggaacaggcgcaataaggcgaatatcaaaggattgcaaaggtgccgttcgatggcgaaacatcaacggcaccttttgctttgcacgcttgctttgcatgcccgctttgcccgcctgttacatatgcgctcgcccggattccatggcatggagtagaatgtcgcgttggatatgcgctttccggcgaagcctgaagtggcggcgcaccgcatgccgtgcatgtgtgaattcgtcgaggatctgaacgcgcgtttaggagcagaatggctaaccacagcaagcacgcccgatcgtctaccttcgccatgccgagcaagtcctcgctggtgaagatcgccgcaacggtcgcggcggtgggcctgttggctaccggcggcattgtgtcgcgcaatctttacacctccgcggagcagaacacggccaatcaggtcacggccttctccgtcaccgattccgccgaagcatcccgcggcaacgcccgtgagctgctcaatggagacacctcgtacgtcaccgtgaagatcaacggcaagtcgcgcgtggtgcccggtaccaatttcaccgacgtgaagtccgtgctcgacgcgggagacatcacgctcgaaccggaagacacggtctccccttcgctcaccaccaaggtggatgagaagaccgtaatcaccattcagcgtgccggcgcaagcgttgaggtttccgacaccgccatcggtttcaatgtcgtcaagaaggaaacctcaagcctgccggaaggccaggagaaggttgagacggaaggcgaagagggcgtgatggaaaccacgaacctcgtaaccaagtccggcgacaccgttgtctcttccaatatgatcagctcgtatgtgaagaaggctccggtcgacaaggtcattctcgtcggcaccggttccacttcgtcgtcgtcctccagcgcttccgcgtcgatcggcaccactgtgccggcgggcgaaatgcagcagtgggctcacgattatctgctgtcgaacggctacaccgaagccgatttcaccgccaccgtatacatcatcacccacgagtccggctggagcgtcaccgcaacgaatccgagttcgggcgcctatggtctgccccaggcgttgcctggcagcaagatggtgagcgcgggcgccgattgggccaccaattatcagacccagctcaagtggttctggggttattgcgcgcagcgttatggttccattcagggagcctacacgtactggctggccaatcactgctattaaatcgcgattgatcatcattgattgattcgatgatgatatagtttgagctccgtaatattcgaagatattacggagctcaaactatattacgatcttaaatatcactgggatatcgccgatttcacagggcattgttggaaccgatcaccgtggcttccttgacgtcatcgatcttcctgcgcctgcggccgccgtgaccggccttcggaccacgcttgccgacggtgccgctgcggaccccgttcttggcatcgaagatgatcacgcgctcatcgctgtgatattcgccgtccagagcgaagaaggcgatcttgtctgcaggcacttccgggaaggtgaagaacttctgcgtcgcaacgagcaggtcaaggttgcgggtggtgacggaagacggcgtatcggcgttcggagcattgaactgaagagcgaaatcgtcattctcatcgcatacctggattgcgaacttgccgcgctcgtaattcaccagcagcttgacgtattcaggacgtccgagaacttcggaaacacccttggaaaaacgaacggattcaagcatgaccgtcatggtcaacttgccacccgttctttcgccaacttctttgaaaccatcaagaacggacatgtaaatccttcctttattgtaaataactacgtgaaatactgtacctcattgttaagaataaaacgaatcgaatctctgggaatatattcatattttcaagaacacaacataatacgaaaaaacataccgcagaccatgcttgtctaaatgagaaattcgatacggttcagccagcgcacttcctaagccaactagatgagcacaccaccccttgtcagcccgacggttttccgctaaaaacagatgtggtaacccctacctcacccccgcactacgggttgcgcaaattgcaaatactttgcagcacagttttccaatttcatatagaaagcgctgaaatatcgtgctttatgcatgcatatcatttgcaaaacggttcatataggggctatcttgcacaactatcttttgcaatcattttcatttttaaaatgattttctcagtaacgattttcattgaaaatccgccatttttcagcatcttttacactccaaccgggatagaatatacactacacggttgcagtattgcaaacgctatcaaagaagatggaacccccgtcgcaaagcagcggccacgataacggagccacaagccccgataccggcccaaacacaagaaaaagaaggatcaggaaggtcaatgaaacatcggaaaccaactcccgcctggcaaaagctgggcctgcgcgtcagcaagaagctggcagtgggcgccacagcccttgccacagttttcggcggactggcagtcgccagcgtctccgcacaggcgagcaccgaccgtagcagttatgcggacaccgtaggcaacccgactttcgaagcagcacgcaaaaagtacggtctgaccaaggagatgaagaacggcgctattctgcacgcgtggatgtggtcgttcaacaccatcaccgaacatatggatgaaatcgccgaagccggttacacctccattcagaccgagccgatgagcaaaatcaaggtgaacgacgccaacggcaagaaattcaccgaaaattggtattacgtgtatcagccgacgaacacctccatcggcaacttcgtggtcggcagcgaagacgacctgaaagccatgaccgcggcagcccacgcgcatggcatccgcatcatcgtcgacgttgtggccaaccacttcaccgccgactggaacgccattgactccgactggcagaagagcgaatatttccatgcgcgcaactcctgcagcggctccggcggcgacaacatcgattattccaaccgttggcaggtgacgcattgccacctgctgggcctatgggatctgaacaccgccaatccggaagtcgccaatcgtatgcacgacttcctgaaaaccgcggtgaacgacggtgttgacggcttccgtttcgacgccggcaagcacgtcgagctgccgaacgaattcgacggttcgcagtattggaccaccattctgcagaacggctcgcaataccagtacggcgaagtgctgcagggcgattccggactggattacaaggcgtacgccaacctgtatgccaagtatggcgaaggcggcggcggagccacggcctccgactatggcaagaccatccgttctgcactgtggagcaagaatctcaatgcgggcaatcttatgagcttgcgcaacgggggcgtcaacgacgatcagctggtcacctgggtggagtcccacgacaactatgccaatggcgacaaggaatccacgtatctgaccaacgatcagatacgcttcggctgggccgtggtcggcgcacgcgcaggcggagcgccactgttcttcaaccgtccgaaggcctccggcggcaatcagccccagttcgcagaagcctctcagctgggcgacgccggcgatgacatgtggaaagacacggctgttgcggccgtcaaccatttccgcaatgccatggacggcgaggccgaatacctgcgcaactgcggttccgaacagaacaacaactcctgcctcatggtggaacgttacaagaccgacaacaatgccggcaatgacggcgtgagcatcgccaacatgggcggcgaccagaatctggccggcactccgaccaagcttgacgacggcacgtacaccgatcaggtgaatggcggcaccatcaccgtttccgacggcaagatcacttccggcaccgccaagggcgatgcggtgagcgtgtacttcaacacgagcgtgaaggaatccgtttccgcgaccgtcagcaagaagttctcctccaacaccatcaaggtgacgctgaacgccagcaatgccaccaatctcacttactcgctgagcaatggcaagaacggctccttcgttgacggcgactcgctcaccatcggcggcgatatggagatcggcgattccgtcaccctgaccgtcaagggcaccggcaccgaaagcggcgaagcgctcgagttcaccgcaacctacaccaaggttgaggttcaggcgaacacgatttatgcgacgaagccttccggctggagcaagatgtacgcgtacgtgtacacgggcgacggagcgaccgcgaagaacaacgcggcctggccgggcgtggagatgaccgcgatggcggccgccgattcgtgcgccaaggccggcacatacaagtatgaggttccggatttgggcgagggcacctatcgcgtgatcttctccaacggcaacggctcgcagatgccgggggccagccagcctggttttgaattctcgggcaaggcgagctgggatggttcgtccgcctcgctgacagccatcacctgcacggcaacgcctccggtcatcaagaccgcggacatcaccttcagcgccacggccgacctcaagaccggcgagaccctgtacgcggtcggcgactggggccagggcaagggcaagacctggacccgcgccggcggcgtcaagctcgccaagaacggcaacgcgtacaccggcaccaccaccatgaccaagggccaggccatcaccgcccgactgatcaaggtcgacgcgaacggcaagaccacatgggacgagatcggcgacgtcaaggccaccgccgacaagaccaagaccgtggacctcaagtggaccaacgcggtcgagaacaccgtggacatcaccatcaacgcggccgccgacctcaagaccggcgagaccctgtacgcggtcggcgactggggccagggcaagggcaagacctggaaccgcgccggcggcgtcaagctcgccaggtacggcaacgcgtacaccggcaccacgaaggtcggcaaaggcaacgccatcacattccgtctgatcaaggtcgacgccaacggcaagaccacatgggactcggccaaggaccgcaagtccaaggccgacaagaccaaggcgctcggcgtctcctggacctccggcaaggtgaacgaggacggcacgatcccggacgactccgccatcagcatctccggcaagggcgtcgcggacggcaaactgtccatccagaaaggcaacctcgccgagctctacgtgatcggcacccaggacgccaccccgtccgacgctgtctggtggagtgacggggccgccgtggcggtctccggcaccggcaccgtctacggcgtccagaccggcaccgccaaggtgaacgtgaaggtcggcaaccaaaccgccaccatcaccatcaccatcaagtaaacggcaaccgccgatatccataaaacatttgagccttggaattcaatatcactccaaggctcaaatcatattcaaacgcttctatacgcatgaaaatacacacatcaaaatcagcggatttagcataatcagctcaaagcgtcgtgcagatatcgctttgagcggctgcgcatgatatccagtgcaatatcggcattgcagaaatcgatggtttgtgaggtatcagtacaatcaacttcggaaaaatcagtgatgattctgtcggcgatttgcacttcctgcaggatttgaccgcgtctggtgccgagttcatgctctttggtaccttccgtatacacccagaacggtttatggaagttgatggagaacagcgtgccatgataggagtccgtaactacaccctccgcatatttcaccagcgagaggaattcttccggccctgcctcgagcacattgacaagctcatcgcatttcggcacattgcccgcctgcggcgtcagcactgcgacaggtaggccgactcgacgagacagttcacgcagttgcctgaatacgccgacagcacgcttgggacgcagcagcgaataaaacagcagatactgttcgggcacgtgttgcgactcacgcaacggtatgcgttcctcccattcgcccgcgttgagcaacagcgtcggatcgcatacgtgttccacatatttgccgcttacctgccgcagtttgccgcatgcggaacgttccctcgccgaaagcgcgctgaattccaccaacgccggtccgatgcgccgcagctcatcgtcggtcatggtggccggcgacgaagcatacgagatttttctgcagttcgcccatttcagcaggtacgggtccatgtacttccagtcgacgcgttccagctcgttggaatgcttgttgatgatctggtcgctgccgctcacggccacgtcgaatgcgtcagccagcgaattcagctcttccggctcctgatagcgtcgttggcccacatgtatgttcgtgctgatgaaccgctcgaaattgcgcatgcgcttcttgcgcagtcccgcaaccggcagcatggttaaatccgcgagggacgatttgaggcccagcccacgccaatataagcgttcatagtagcgttcgccctcaagcggccggtagtcgatgacggtaacgtcatgccccatgtccgtgatggttgattgcgtggcatacgcctgcaataccgaaccataattataggcagcatgatacgtgattagaccgataatattatgcttctcgtccatatttcctcgtcgttcaagtagttatttctttgttttctcgctattgcagaagcactccgctttctcattgttttccactgaattgcttatgacgcacccatgcgatcgcagcgctcacgtaataccatcgatatttcatcgaaagcaacgcgatttgtcgggtcacaggaaaacgacctccccgatatcgatcaagcggctgccgaaaaaccggcatgttcactacttttccatagtgattctttcgttcatgacggttccatggcgcttcgggattgaacagatcattgatcataatgatcgtcagatgaaataatgtgtaatcatcgagcgttccatcagatatttcccgaaattgacgaatggtatcgcgcattgtttcgatcgcagatattgttcgccgcacataatcgttggagaacgaccgcaccgccgaatccgcattgcggcggtattcgtacaccatttcatccacatagccgattcgattcgccgccgcgaccgcacggaacgcatattcggcgtcctcccccaaactcaaggtttcgttgaatccgtcgatccctttgatcagcggcatgctgtacagcttgccccaaacaagcgcgatacctcgctgcggtcggagcatatcctcgcataggtcaagacgcctgcgtccctcgaacaccatgtcagtttcagcataatggtgttcttccatacttggagacccctcgcctttgccgcccataatgacggcaccagcggcgtcgggaacaccgttcgcatcggcatcggcacctgcaagcacgttgcggtacgcccccatcaccacatcgcagcggtatcgcaccgcaaacgcaagcatgccgtcgacggcatgctcggcgagcgcatcatccgcatcgaggaacatcgcccactgccccgtggccgcgcgcaatcccgcgttgcgagccgcggagactccggcatgggcgatcgtttccgtacgaatgctgaccaatggcgaattccaattcgagatcggtgccgtttcgaatgccggctcaccatcgaatacaatcaccgcttcgatacggaagccactgccctgctgccgttgcagactgttcacgcaatcatgcaacgtttgcaacgtggcacggtagacgggaatgatcacactgatggtatggctcatcgtcagttcagctcccgcgtgatcaccgaagcatcataccggaacgataccggcgattcgatgctttccgggaagttgccgatcgccacgaacgcaatcagcgtttcgtagtcgggtacgcccaacagcttgcggatctcatgctcctgcttctcacgcatcatggtgttgagagggcaggcggccagcgactcgcattccaatgcggtcaggaacgccatggcgaacaggcctccgtcgatatacggctcgttgcgttcctcaacgcttacgaaactgcgcacgtccacgctgatcaacgccagcaccggaggcgcatcgtacccacgccacccgccctgcaacgccaatgcctgttcgatgaatttcggattgctgatcagcagcacgcgatatgcctgcctattgcataccgatggcgttttcatcgacatgcttacggccttacgcaccgttcccatatcaacaggggtttcggcatactcgcgtacgctggaacgccccgcgaacaatgctgcatagtcgagcgatgcgttgtcgcgtttgtctgcggcacgcacggttttcacgcccgcattgcccgcaacgtcggctttttcggcttgttcgacgctttcgatatccaccgaggccacttcgtcggcaaaccatacgcccacaaactcaggaatcggcttctccaacgcccgatgcttgcgcacgtatgcacgaaccacctgccgtgccgcgatatacgtcacatcgtcaaccggatagtcgcgttcccgccattcatccatcacggaacgcaactccccgaacgcggatctgccgaatcccgcacggaaccgtctatgcgacaatcctttttcaatacgatgaatgtaatacaccatagtgccgcgcaattgctcggattgccccacattccattgccccgcgcagaatctcaggaaccgtttgcgctgccccgcatagtacgaagccaatgtcatgttcgctttgcatccttgcaatacgcgccagacgcgatgcggaacgatggttttgattcgctgcttcacgcccatgatctcacctttccttgttttctcgacgcaacgacggcaataccgcctgcaccttggccatgacttcccttgtaaaccagccttcacgcagcttctgccccaattgcgaagcccgtcgtaccattcgcgcatactcgctttgcgtcatgccgtattccacggccatggcctcttgcaacgattcgacggcaacgcccactccctgttcgactacgaatggtgcgagcgccgccttgttccatatgatcaccggcttgtcggctgcaagatacagcgacagcttatgcggattgttgacggtcagatatttgccgtaatagccgccgcaggtgtcgagactgtcgccgtcccagatcagaccgaatcgtccttccagtttgtctggcagttcatcgggtgcgacgattccgcggtaccacgccgttttgccgttccgccggtcatatttcggcccgtacagattgatgtcggctttggggaatcgctcggccagccgatacacgtattcggctttgccatggctgagatttcccgcgatatcgatgccgtgacgctgttccacgggcacaggattcgcttgcggcagcaggtaatcaaaaatgccgatctccacgatcggcacggtcgcgccgtacttgcgcaacacttcgctcatgcgtggattgtggctgatgagcagatccgcttcggtcacccattgtttgtcgaaatcggtgtaggagtagccgcgtagcgtttccaaatcatgaatcaggaaaacaaacaacgctccgcgcgctttcatcctacgcacggaaggcaaggcgtacagcgacaccttattgtacatgatgagcggaaattgcaccaacaccacatccccgcagcgaacggttcgttccagccgatgccaatcggcaagcgtacgtccaacgcacaccagcttgtcgaaataccctttgttctcgccgggacgcacttcgaacggctgccaggattggctttcgagcacctgccgaatgtcatcgcgcgctttggatccagcgtgcgcatgatgcagcgaacgttcgcagatcacgtagttcgtcattgccaacctccattgtttgcatatcgtccgtcactcgcattgcttgcgccatacgcgttattctcatcattcgttttccgtacatgcagtcggttgaataccggctgaagcatggccataacgaatcgttcgcggcacagcagcaacgcgatgccatatatcagcgcgaacaggaatccgccgaacatcagccacaggaaggcgttccatgtctcggcaccgcatatcgcgatcgcgccccgcgtaaggcagcctgccgcaatcgcactgagcagaatacgcatcggatcgatcgacgtgcgaatgccaaccaaaaacccgcggcacacatatgagcgcatcgccagcatcaacgcttcgcacaatgaaatgctgatggcggaaccgaccacgccgagctgtggaatcagcagcacgtttgcgagtacggccaaggcaagtccgatcgcgttcaccatggcccatgtacgttccattcctttggaaatcatgacattcgcaagcacgatattcatggccgaacacatcaccgcaataccgacgaatcgtagcggaaccgcggattccgcgaagtcagcgccaccgagcaatgccacgatcgggtcggcaagcaatatcagcagagcaatgatcgcggagccgaataccataacgaaattcatgtttttcgcgatcagttcgcctgcctgccgctctttgcgccgcgcctgataatacgaaaggcgtggcagcatcacgttgccgacggaattgacggcggtgacgagcacggatttgattttggataccagctggtacaggccgaccatatcggtggtgccaaggaagccgagcatcacaatgtctacttgaatatacatgccggatgaaatggatgcgatggtgaaccatagcatcggtttgaaatggcgggaaatattgagatgtccacaattgcggaagtccacgaacctgcgtagccgcaggagattgagcacgttggatccgtacccggccaccaccacgatcaggccgtatatcgcgtagtcgccgcgctgccgtacaaaagcgaacatgagcaccaatgccagcagtttgaaacatacgctacgcacggtgatgtattcgtattgttccaacgcctgatagaaccattccacaccgaacgaggaaagccagatggccaggccgaaaagcgcgaacagcccgaattgcgcgttcattttcggtacggtgaacaggcacgccaggtagaccgcgaacaccatggtggtggagcatgccagaataaccagcaattccagcaccgtacgcgatagttccgcgcggtcgtcgcgtacgcgagcgcagacgcgcactccgtagtaggtaacgcccaggagggccaccagcgaaaagtatgaggccacggattgagcgaacgccacatgcccggtgccaccggtggaaagcacgcgcgacacgtatggcacggtgatgagcgggaagatcactgacgacgtagtgacgatcatgttcatcagcacgttgaatttcacggatcgaatgcgcacgtcggttggatgcttggacggcttgctggacggctgcccgaccggcttggtcggctgacgttcaggcataaagcaccacccgcttggcgaaggcgcgtttgcgtatgcgcacggagttcacgaagaatatcagcaccacccaaataatgatgtttctgagcatgatctggttgaacatggttgacatccaacggttggagaaaaagctgaacgcacagcaatagccgatggcaccgtacagcatcatcgatatgggaatgcccgccttgccgtattgcaatgcgaaaaccgcgctttcatagcaaagctgagaaagtgcggcgatcagcacgatggcaagcatcgcacccgcgatgccccagtcgaaaatgaatgcgtaatatgtggtgaatacgttgccaagactgcgctcgccataccgttggaagggttgccattgcatccagtcaagcacggttttgccgaatatctgggggaacgaggcccgggtggaagccaatgtcatgtctccccattgcgtggatttgaccgccaacgaaggcgacatggagttcgtgagatacgcgtctaggttttttatcggcgctccaatgtagatggacaggtattcgtacatggtcgagtcgcccgccttgcgtcccatcagcgacagcagtggcttgaacgaagccaatcccacgagcgcgatggccacgaatttcaacacagtgcggaagccgagccgcatgcctttccaacggttgttctgcctgcggaacaacgcccagtatgtccatgcggcaacgccaagctgaatgaggctattgcgtccgccggaaatcaacgtcatcggaacggccgccaacacattgatgaccgcaagataatcgttgcgcaacgaacggaccgccacgctgcgcatggcgagaaacagccacgcataggccatggcgttggtcgccagatgcagtagcgagggaattccagagagggccacgcctttggtgctgaatttgttgagtttgtcatacaagccgatggctttgttcagagagccgtctcccccgtagggcagtgtcaatgagattatctgccgtgacacgatcagcaatgccaaaccggtgaacagcaggccgccaacgtatacccacatcggcagaacgatatcttgcggctcaccgtattcccgatgtgctgtccgatgtccgacgccgctgcggaaaaacaccttcacaccgtaagccgtcaatgcgaatgcgaacgtgccgaatccaaccacgaagcaggtttgcatcgacaggtcgaaatcccaggtccggtaattggtgagtccattgaataccgcgagcgtgaatccgaccacgaatagtatggatggttccgcgaaatccccgcgatatgccactatcagcagcaccagcaatgccagcaatgtcaagaacagtatggtcgaggtcatctcatcaccatgcctaatgtgatgcgatttccggatgccgtcgcttgtacagcgcgtacatcatgccgtacagcgtcggagaggtggccaggagtttccattgcagcagttgacttttcccaatgattcccttgcgttccaccattggcagcaattcgcgcaattccgtacgcgcataccgttcgaattgcgcccattgcttgcgttgatgcgcgagcatgatgcgattgcaggtaccgacaatggattcgagatgcccatatgcggcatatgcttcaacatgcggatatttggttcgcaccaagtcgagcatggctccggtggattgtgcgaatttgtcggtgatgccatgcgactgactgttttccgacattctgtaacggtacagcggcgtggaatcgtatacgatgcgatccgccttgtcgagcagctggtaggtgaccggcgaatcttccgcatagacggcgtcgagcgggtagcgcaggttatcgaagagttcttttttggcgagtttgtcccacgcggtcacataaaagtagccatgctgattcacataggcgaatgcttcctgcgaggtcatgacgattttcttgtcgggaaaagcgttgcagtaggtgctgccgtcagggttttcccgttcgtacgagatgatcgacaggtcggcgtcggattcctgcagattgtgcagcaacgtgccgaacatatcgggaagcacgtaatcgtcggaatccacgaatccgatgtattcgcctttggcaaggtcgagcccggtgttgcgggccgccgccaagccagcattgcattggcgcaccgcacgaatgcggttgtcacgattcgcccaagcattgcactgttcgccggaggaatcggtggatccgtcgtcgaccagtatgatttccaatcgttcgtaggtttgcccgataagactttccacgcattggtcgagataccgttccacgttgtagaccggcactatcacgctgatgaggggttgggtcgaaactgccataagacctgttttcagcagcttttcacgtactttttgcctacgaatttcgccataaggaaaccggacccctttttgatccagtccactggttcggggctgatgataggcatttcgacgtacgggtaatggttggtttccagccatacatcgaagaggatttcgctgatgcgtccgggaaatcgcatttcgaagacgctgtatgagcttgaatcgatatgcttggccagttctccgatgatgggaaacatccacgagcagtattcgttgatgaggtctttgcgcatcacgaacatgttgaacaggtgcgccgaggttttgttcatttgcgcgtcgaatgcgtcgaggtagtcggaattggtttgcgcgataatgcttcgtgtcgcatcgagctggccttcctgcatggtgtgctcgtaatgtgaatatacggtttcgatatagtagttgcgtcgttccggcacaatgatttcgcacgtatcgagcagacgcgcatagtcttgttttcctgcgatgcagctgaagcgttcgttttcgtctccgtggcgtttcgcactgtcatttttggcaaaatgacggcggtagtgcaccaatccctgatagtcggcatcgcagtttttccacatccaatacagtccggtcagttcggaatattgtgcgttcaactgcgaaatattatcgccggtgttgtcgcacgtcatacccaaatcgacgttcggatgcaacgccctaccgacctgcaacggcatatatacgccgtcgatcggcatacggtacgccttatgcgtggccacggccaccgtgatgtcggagtccgccatcactgtcatcccttctataccggacgcgcactactgccaaagcacgcccttatacttcaccctcccccttgtctggagggtacagcatacgttttcattttatctcaacagttcatctagatttcaccaaacgtcagacactcccgttttacaaaccccatttttcaagctttttcaagattattttacaaattatcatgttttgcaagagattgcagacgtttgcatacacgacgtgaaaacgaactgatttaaagctttaatcacaccccacacacgccatccaacacccccgatatggcaatttcaggatcgcctctttcataaatattgaaaatctcgtcacaactgtttcattactacttcggcgtttcgctgccatcatgttgggattacaagaaaaaacgtttgcagatcattgcaaacgattatgaaaaacagggcgcacgactccaatatcacatattgaaatcgcacgcccctgagatctaccggtcagaccggtggatgtatggctttatgaaatccgtttgattccttatttgacggtgatggtgatggttgcggtcttgcccgcggccttcacattcacctttgcggttcccgtctcgacgccgtacacgacaccggttccggaaaccgccactgccgcgccgtcgctccaccacatgtcgggatcacccgtggcgcccttcacggagaggttcgcgagctggcccttctggatggtgagcttgccgttcgagacgccgtcaccggtgattgcgaacgttaccggcacggtgccgtcctcgttcacggtgttcacatcccaggccacgccgacggtcttggccttgtcggcggtggtcttgcggtcggtggtcggatcccacgtggtcttgccgttcgcgtcgaccttgatcaggcggaaggtcatggacttgccggtcttcacgttcgcggtgccggagtagacgccgtcggctcccgtggcggtcaggcggatgccggaggcgcgggtccaggtcttgccgtcctgaccccagtcgcctaccgcgtacaggctttcgccgctcttcaagtcggcggccgcgttgatggtcacgtccacgctttgcgaaacctggcgctcatcccacttgagggtgagggtcttggccttgtcggcggtggtcttgcggtcggtggatggatcccacgtggtcttgccgtcagcggaaaccttgatcaggcgcatggtcatggactgtcccttggccacggtcgcggttccggtcagttcgccgcccacggtagtgagctcgacgccaccggcgcggttccaggtcttgcccttgccttggccccagtcaccgaccacgtaggccctctcgccggacttcaggtcaacgccggtcgccttgaacgtgatctgcacgttcttgtcgtcgtcaggaggcaccaccacggtgcaatccacggccttcaacgaagcagacgaaccatcccacgttacggtgccgccgttgtagtcgatgcccggctgccgggagcccggatactgctggctgccaccgtcgttgaaaatcaccttcgcgccggacgcgagcgaatcaggcacctcgtactggtaaccggtctggtcgcagttgtcggcagccaccatctcgacgcccggccaggccgcgttgttcttcgcggtcgctccgtcgccggtgtacacgtacgcgtacatcttgctccaaccggaaggcttggtcgcatagatggtgttcttcgccaccggcggtgtcggaagcgtgccggtcaccgtaacggtgatcgaatcgctctgagaaccggactttgcggtgatggtcgtggtaccggccttcttcggcgtgaccgtaccgttggcggaaaccgtggcgacggccgtgttggaggagctccagctcacggacgaaccagccggatcggtggtggcggtcagctttttcgcaacggcgccattggaaagatcagtggtgtagctgccaccgttgatcttcacgctggtcaccggagtcggatcttcatggccaccgatgttggccatggcaacggtgaacgtgtcttcgtcggacttctcgtaggagttgttgacctgagaggaggtgtccggcagatcggcattgtcgttcatcgccatgtcatacggcagcgaatccattgcggaaaggccgaaggtggctgccagttcaacgccgagaccgtacttttcgatatggtccgcggtggtgccgagttcgctcagcggaatggcgatctcgtagtgatcgtccatgcctgcggagttgtggcccagatcgttgaagttgacccactgtgcggagccttccttgtcggcgctcatgtcgccgaccactcgaccgttgctttcaccccagccgccgttgatgccgatcacctggctgctcaggatgccgttgccgtaaccgaacttgacgccggaagccttggtgttggtcttggcgttggctgccggaccatattcggcgttggaatcaagacctgtagcgtcgcccttgtagatccacggaccgttggaaccgttggtggaaatcgtcacgaccttgttgacgttctgctcaccgctccacttgatgccggaagcccacagggttccgccggtggaaagtccgccgtccttgcccactcgggtgctttcgtccttcgtgtcgatggcgatgtggaacggcagattctgcgtctgccacaggtggccttggctgagcggataatcgtcgccggtgtcgaccacgtcttgcacgttggtcatttcccacatgaggtacagattgtcgtcatcgtaggcaccatacagtgcatacagatcgatcggcacctcatacatggaattcggtcggtagacgcgcggatcgtcgttggctgccccctgtgcgatcagcatggagctgtcccaatcggagatgctcgcgccttttccggcattgaagctgatggttttcttcacgccgaagccgactttgttcgtgccatatcgcgaggcgaggttctgtttggcgacttccgtcttggtcaccgtggtttttccggtgagtttggatccgtcttccgtgcttgtgccggtcacggtcacggtcacggactcgcccacggagatggagctgcccacggtgatgacgtcaccgttcttgaaggtgccggacttgccttcggaggtcgtgtacttgaggttttcggccttgcttgcgcgcagggtcacgtcaacgccgcttccgctgaatgttgcggaagacggttccgcggaaacgtacggcttggcttcggccttcagatagtaggcgctgaccgcgttgcccttggcggtgccggaggtgatcttgccgccggaaacggtgatgcttccgccgttgacttcgtccggatacacgccgtcgtcaaggttggtgctcatgccgacgaggctctggtcgccgcccatgttggcgattaccacgccatcgttggcggtgccgtccttggtgaagcgttcgatcatcaggcaggacttgttggcgttgttctgatcggagccgcagttctgcagatattcgctcttgccgtccatggcgttacggaagtggttgacggccacgaccgacttgttcttccacatgtcgtcgcccgcatcacccagctgggactgctcggcgaattgtgcattggttccgccagagccgaccggacggttgaagtacagcggtgcgccggccttgcgggagcccacgatcgcccagccgaatacgatctgatcattggtcagatacgtggattccttgtcgccattggcatagttgtcatgcgactccacccaagtgacgagctggtcttccttggcgccgccggtatcgatgttctgcaccatcttggtgctcagattgcctgagctgatggccgcgcgcacggacttgccatagttggatgcggtgttgccgccgccgtcggaggaattgttggcgaacaggtccgcataggccttgtagtcgaggccggaatcgccctgcagcacttcaccgtactggaactgcgaaccattgttcaaaatggtgttccaatagttggaggtcttgttgtcgaacacttcggtcggcagttcgacgtgcttggcggcatcgaagcggaagccgtcaacgccgtccgcgactgcggtcttcaggaagtcctgcatgcggtcggccacatactggttctgcgtgttcagatcccacaggccaagcaggtggcactgggtcacatcgcggcggctggaatagttgatctggtcgccgtcgttgccgccgcagttggaacgggagtggaagtagtctttgttctgccaatcggagtcgatggcgctccagtcggaggtgaagtggttggctaccacgtctacgattacgcgcacgccgtacttgtgtgcagtggcggtcatttccttcagatcgtcttcgctgccgaccacgaagttgccgatggaggtgttcgccggctggtacacgtaataccagttttcggtgaacttcttgccattggcggcgacttccttgattttgctcatcggctcggtttgcacggaggtgtagccggccgcggcgatttcaggcatatgttcggtgatggttttgaacgaccacatccacgcatgcaggatggcgccgttcttcatgctctcggtcaggccgtactgttcgcgggcctgctcgaacgtggcattgccgaccgtatcctggtagctgtcgcggtccgaggcgagtgcggtggaggccacgcccatgccgcccagcatggtggcgacggccgcgactccggcggcggctttcttccacgttttgatggtgcgggccttgcgggccgcctgcctgcgctcgacgcgggtcatcggttcggatggacccccgtcttgcgggggctgttgcttagtgaatacgtacgcaatacctgcgaacgtacgcgaacttattcgcactttgacctcctgcttccttgcatctttcctttgaaaacgtttgctccttagcgaacgtaatctttaaaatatcacaaatttttggtgaaaaatgagtgatttttaatgaaatcgacgatgaaaaatgattggtttttctgcttttttacaaacgctttcagcaaggttgtcccccatccttcgacccccgatatacgacatgcctcgaaacagccacatgcaaacgtttctgaaaatcgtttcaccgcatgcacccgtcaacagcctctcccccgcttcttcacccctcttcagggcaacgggtacaatacgaaatcgtcggaaaacacgaagaaacacggtaggaaaggacagacccgtgaccttcaaccgctacatcctcttccgcatggtcgttgaatttgtgggagccatcgcctgcgccatccaaatgttccagcatcacacgtggccgggcatcatcaccatgggcgtgttcgcgctggtgtgggccataggcgagatctggctgagcacggtgtacaaccgcgcgcacccccgccgcgacgagctgtccgacgagcatcaggcgacggccatccgtttcacgttcttcgtgcttgtggtggcgctggtggtgttgggcttcgcgggcatgatcgtcacactgttcaggcatgcgccgttcaccgttcccgccatggcgttgccgacgttgggcatgctggcgctggccatcgccgacgcccgctacctgtggcttgagcatgagggcggggacaccgatgaagactagtttgaagttcaaacgtatggaacgcggcttgaaacaggccgatcttgccgacttggtgaacgtgcgccgcgagacgataggacgcctcgaacaggggcagtattgcccgtcgctacgccttgccatggatcttgcaaaagcgcttgataccacggttgaagacctgttcagttttgacgacgaagagtgacgcttcggcgtgttgcgtttgtaaattcttatcaaaatggcgattttccaacgaaaaatcgccatttttcatattcgggggcatgtgcgaacgtcgtcacatggtgtgacaacgccgtcacatatgtgcgattcacctcacatcccccgagagcgcggttctcaacgggggcgtatagtcaaggtcgtagcgggaaaccactacggcaaaccgctgaaatgtacgttatatttagagaggaatcacgattatgaagaagaagatcgtcgcaattctcgccaccatcgccgccgtgttcggctttggctttgccgctaacaccgctatggcttatggcgcgaccggcaccgtttccggcaacgtcgccaccttcacgtttacgggactgactccgggccagcgctacgtggtgtcctacgatgacaccaccgtcgagaacgtcaccctggctgccaccaagtactccaacgctgccccggcccatgaggatggcaccctgaccgccacctacaccttcaagtctggctttgctggcaccatcgcatcttccatctatgcagtcgatggggcagacaagccgaccggcgccgctctcgcttccgcctccgtgaccgtcgccgctaccggcgaaggcaccgccaagaagaacgagaccgcttccaccggtgctgctatcgctccgtacgttgtggccgtcgtgctgctggctgccgctggcatctccctggttgccgttcgcaagagctctgctcgctgaacaataaccaagtagatacacaccatatctatgtttcatgaaggggcttgggttttcccaagtcccttcatttattcgaaaacaagcatcgtaaaaccgattgttttcttttttcaggaagagatcatgaaagtcctgtttatctgcaccggtaatatctgccgctctcctatgggagaactgctcctcccccaattcatgcccgatcttgaatccgacagtgcgggcacacgcgggctcgtttcgcacgaaatcgcaccgaacagcaaaaggctgctcgaccagcatggcatcgattccagcagcttccgcgcgaaacgagtcaccccgcaaatcgcgcagggcagtgatctcatcctctgcttcgaacacgagcagcgcaaggaaatcgcggtgattgcaccaaccgcggcccgcaaaaccttcctcatcaacgatttcgccaacatgtgcgtctactgcaaggaacaggggtacatggggggtaatacccggcaggaaaaactcgaatcggtaatcgacaacgcaagcatgatccgaccgatgatccccgataccaacaatgtggaggatccgatcggcaaggacttcgccgtatatcaggcagcgtacaacgaaatctgcaaggctttgcagaccatagcaagcgccactgcctgaaaacgttgaaatatcaacgaaccaagctagaaagggtgcccacctccctccatgggggtgctctttgctagtatggaacctgatcaatatgatgtgacaaatgtcgaggggaaacatggctgcagcagaaagcaacgtgccagcaaccaatcaggtggtcgtcgaatccaatgatacggaagacgacggcatcaccttgatggatttgttccgtatagtccataagcatcttctggtgggcatcatcacgttcgtggtggttttcgcagcggtgtgcgcatacacattcctggcacccccgaagtattccgcgaccgcgcaggtgttcgccacctacagtgattcgtcggtgcaagacaacaatatttccaacatcaacagcgccagcacgtatatcaccaaccagattcagtcgtatccgacgctggccaccacggaatccgtgctgaagccggttatcgacgatcttggcctcgacaccaccgtcgcgaatctggccgggcagctgaccgtcacgaacccgacgaacaccgcgttcgtgaacatcaccgccgaaacgggagacgcgaagcaggcttccgacattgccaacagcgtggcggaatccttgagcaatgtggtggaaaagtcgctgtacgcttccggcaaggagtcgccggtgaagctttccgtggtgcagcgcgctgcggagcctgttgcccccagctccccgaaggtggcattgtacctggccgttggtctggtggctggtctgattcttggcgttttcgccacgctgatccgcgatcttatggcaacccgtgtggaggaagccagcgatctgcaagacattatcaacgcgccgatcatgggtcgtatccctaccgacgaaagtctgcagagcaacaagccgctcatcgtgtcgaacccggcgggccgtatcgccgaggaattccgccgtattcgcaccaacctttccttcatgtcgaaggttgaaggcagcgatgcgcgcatgatcgtcatttcttccgtcggaccttccgaaggcaagaccactgtttccgtgaacgtggctgcagctctcgctgaaaacggtgcaaaagtactgctgatcgacgctgatttgcgtcatccgtccgtcgccgaacgacttagcctggaaggcggcgccggcttggcgcacgtgctttccggtcaggccaccgtgaaggatgtggtgcagcgctattggaggccgaacctgcatgtcatgccggccggcccgaagccgccgaacgcttccatgctgcttaattcgaagaccatgagcgaattgctcgacgtggctttgcagacctacgattacgtgatcgttgatacttccccgatggtggtggccaatgatgccgctgtcttcggcgcgaagagcgatggtatcgtgcttgtttccggtcgcgacgtgaccatgaagcgcgatctgaaagacatcgccgtgcagctcgacaacctcaacgtgccggtggtgggcttcgtgttcaacttcgagaaggaacgcaaggcctcctcgaatgattactactactattactacgatgagaacggcaagaagagcaagcactctcacaagaacagccgcaagaagaagtccaagcactgagcttgtgacttctcaaccaaaaggggttgtgagtgaatcttgatgattcgctcacaaccccttttccatgccacccgcatattggcttatatatctggtacatatggcagatttcacgtctcgacatgagacatctcgcttatatatggcacatcacctgcgaaaacagccacttcgggggtacgttgctgagggtttcgccacatgtgtctgccatatataagcgagatactcacccaatcagctgcgaaggaggatttcctctagggcgctgatcaccgaatcgggcatgccggaggtgccgaacagctcgttgctgaaacggggcgcggtatcgaaggtgcgcagagccccgagcgcacgcactccttgctcacgaatcgtctgcatcgcatgctctttggaaatgtacggcatttgcgcatgcaagagcacgtcaagcacgtcctgttcgactgaattctcggcaatctgcagtccgtctgaaatcgtaacgttcaagcatgcaatagacggcacgtcgcgcacaacgatcgacaaactcaatgtctgctgatcatacgaagtttctacagcattgcagggctttcttccgtcaatagcgatgcgaacgttctgcgtgtctggctgcgcaactccacggaacacaatctcccagttacgctgtgccggaatggcttcagcacagccttccaccggactgacggtgaactgcgtggcattgtccgtattcttccagtcgaggctcatgcgcgtatcggcaacatgagtttggccatcgcaagactcggcagatgcagagccggaagcagcagaagccacagagccgtcgtcttccttgagtgtgaacgaaccgttcgcaccggggaacaccagcacctgcagggactccggattgcccagatcattcaccttattgccctcgccaagctgctgcaacggcacgataccgccggctttggcgaatactggaatacggtcgatcgcacgccacacttccaaacgacgcccggacttccctgccgaaacgtaacggcgaccgtcgaagaagtcataccattcgccttgcggcagccatgcttccgtgctacccagctgcgcggaatcgtcattgtcagaaacaattggtgcaaccagcagctcagtaccgaaacggaattcgtccggcacctcgtacgcctgcggattgttcggatccgcccaatacatcggctccaccaatggcataccctcgaacgcggcacgatagttcatggtgtacaggtacggcagcatcatatggcgcagtcgcagcgaactcaccatggaatcgcgcacttccgcagagaaattccacggttccttgcccatgaactgcgaattgctggaatgcaggcgattgatcgggctgaacgtgccaagctgataccagcgggcttccaaatgttcgttgcggtacccacacatgtgaccgccaatatcgtgactccaccatccgtagccgatattcgacgcggtagcagtgaaatacggctggaattgcaaggattcccacgtaacaatggtgtctcccgagaagccaaccgggtagcggtgcgaacccgggccggcataccgcgagaaggtgagcggccaattcccgtcacgcccggaatccaggtagtgcaagtggttgagcacccacagcgggtcgagtcccggctgacgggtcacgcctccctgctgccagtcgagccaccagaagtcaacaccttcggcttccatacgatgatgcatgtcgaagtaggcgcttacgaaatccggattcgtgaggtcgaattccactgcctcttcggttgcgggatcgatgccgacgcgcttggccaccgcctcatagtcgtcttcgaacgcgcgcacgccgtctcgcggatgcacgttcaacgtggctttcaggccgcgctcgtgcaagtcgcgcaagaacgccttatggtccggaaacagctgcttatcccacgaatagccggtccaaccggaaccgtatttcggatcgacatcgtccacacggtgccaatccatgtcgatcacggatgtggtgaatggaatgccttcgcgcttgaaccggtccatgagctgcaggtattcgtcttgcgtgtagcggtagtagcggctccaccagttgccgagtgcgaagcgcggcagcagaggcgttggtccggccagcttgtagaagtcttgcaccgcttcggtgtagcggcggccatagccgaagaagtagaagtcggtttccgcgtgatcgcgtggcataacccaagcccccagcggattcggtttgccgttcacttcgtatgcttccacgatcacgttcgcggcggaatcgtcgagtaccgcccatccgtctcgcgaaatcacaccgtcgccgagcggaatcgcaccattcgcctcgtcgagcgtgcgcgcggtgcctttgagattatgcttcgactcgtcgccgtaatgccacgtattgaactgggtgtcggccacgcccttgacgactacgctcaagccttctttgctgaatggcttgccatcgtacatcacatacagcgcgggggtgtcaacaatgagcagtccgtcgcgatgcgacaccgtgaactgcgtatcggcaccgaaatcgcggttgaccaccatctgcgtaagattgtcctcaaattcgccggaatcagaccattcgaaacggatcagcgattccgttagaatgccaatcctccaatgatccccttgtaaaaccgacgattctcgcattttcggacgtgccttgcgcacatagtcgacgaataccgtgccggttgcgttatctaatgcgttgtttgccatactactcctgccttacttgccactgcccgtcgcaatacctgcaatgaactgcttctggaaaatcatatacacaatgatcactggaacaattgccaacgaagtcgctgcgaacaatccgccgtaatcggtgccgtattgtccgttgaaggccttcagaccgacagcgagcagctgcttgttttcgtcggtaatcatcaagaatggccacaggtagtcttcccaattccacaggaaggtgaaaatggcgagcgccgcgatggtgttatggctcattggcagaatgatgctatggaagattctggtttcggatgcgccatcgagtttcgccgcttcaatgagttcgtcagaaattcccgagatggattggcggaacaggaagataccgaatgcgctgatcatgccaggaagcacgagcgacgtgtaggtgtcttgcaggccccagttggtgaacatttcgtattgcggaatgatagtcactgcccaaggaatcatcatggtgctcataacgatgccgaaaagcaggttgcgaccacggaatcgcattttagagaacacgtaaccaagcaccgcacttgtgtagattgcaataccggttttcagtactgctacgattagcgagtttgcgaacaatcgcaagaaattgaacttttcttggatgctcacatagttgtcaatcgtggatggcttagggaataatcctccggtcactttgacgatttcgctatttggcgcgaatgatgaaatgaacatccaaacaaatggaacaatggtgatgatggcggcgatgaagagcagaatcgtaagaatgatgccgccaattttacgtgatttcatgccagttcctccgaatctccagaaaccttgaacatgatgagggtgagcacaccagtgaacaggaagagcacaactgcctgagctgatgcgacgccgaagttgtatttctggaatgcctgatcaaagatgagatagctgatggtgtaggttgacgtgcccggtccgccttcggtcatgacgagaatctgcacgtatgcctgcaggtagctgatcagtgacgtgataacaatgaacaaggtggttgatttaagcagcggcagggtgattttgaagaaaatctgcactgagttggcaccgtcgatggcggccgcctcgtacacgtctcgaggaagattcatgagaccggccaaatatagaacggtcgcgtagccgaaatccttccaaatggtcatgatgatgactgccggcatggcccatttggtgtcgtgcagccagttaatgtcgagtcctgtgattttgtctaccatgccgaactgcgggtcgaacatccacatccacacgaaagagactgccacgagcggagtgatggtcggcatgtagaacagaccgcggagggtgtctttgcatttgacgagtttggcgctgagcagcagggccaaaccgagaccaagcacaatgcggaagagtgtggaaacgcctgcgaataccgcagtgttccccatggaagtccagaagagtttgtctgtgaggatctgtttgaagttgtcgagcccagcccaatcataagtgccgatcagaggattccagttatgcagactgcccgcgaatgctttaaaaattgggtaggccaggaaaatggcgaaatagaccaccaagaaggcaacggccatgttgcgtagggtgaaaattctcgataccagagattcaccatttttgtttttcattgaatctcgcctctctgtgagtcgattcgaccgttttgttacgcaatacagaatgccggatcgaagcgaataagaagattgaacgtatctcgtagataaaaggcagtcgcggcgcggaagaagaatcgtaccgcgactgcccggattggaaaagggatcggaaaggatatatcggtattacttatgttcgtcgaagtaagcgtacttgctttccattgacgtgaagtcagagctcttcatgtcggtatccatctgatcttgggccttcttgagagctttatcgatggacatgccgttctggaagacgttctggaaagcagtggtgccgctggattcaacggtggatggtgccggccccggccagatcagtcggtctacacgtggctggatggcggtcatgaccggcttggagagaatgtccttgtcgttctgcagcgaagtcttggctgggaaggagttcaattcggataccgcttcacgaatgtaatcatcgttggcaagcaggtacttgatgaagtcttgggcaacggcctgctgttccttgctttggtttttgttgacgcccggagtagattcgccgttgtaacggtcgtatgcaaacggagtgtcttcggagaaagttggggtggcgaacacaccgtagtcaatatctggatacttttctttcagcgtgccttccatgtggccccaagcgtagatcatcgcagactggccgttaccgaaactttgggtgtaatcgttaccgaagtcaacagatccgaccttgtacttgtcatacaaatccttgaggaactgcatgttttctttggtcacatcgttgttgtagttggctttcttgccatcttcgctgaagagcagttcacccttctgatagttcagaccttgatagatggcgctgtaggcatcgccgttgaagttgaagccggcctgcgtcatcttgctgccgtcggtcttggtgagcttttgggcgacctggatgaattcgtcccatgtggtcggaatgtcggcgtcggtgaggcccgcttcgctccacaatgtcttgttgtagtagatgttgccggtgttgatcacggagtcgatgtacttgactttgccgttctcatcttcatgtacggatgcggtggagtagtcggattccagagacttggtgtcgatatcgtaatccgctgcgtatggacgaatcaacgcatcgtgagagttgtggatgttgaaaacagccggaccgtttttgcctttcagagccaacggcagcttggtccaataatcatcccatgaaacattcaccgttttgatggtgacgttcggatacgtcttcgtgtaggactcaatcatcttgtagacaggatccgtgcccttgctgccccagctccagtactcgagctggattggcttgccgtcgttaacgagatgattggggtcgtaggtgatggtgttgccgataacatcaagccctttgtcggctttcgtatcggttgtgccggaggtggcattgctgttcccgcacgcagccaagccgacgatactcagggccgccactgccactgcgatacctttgttgattttcatatctctccttacgtcctcgtaagccttcatccgccccttgcggacaagcaatagcatacgacaagggtttcatattggcaattcaaggttttttgaaatgtaaccggtttcatttgaaacccgtttcatcacaccgctgtgagcgtgcacatattgtttttcatacggcgtgtcgtaccgtaacccgtttcactcatctttcaactttgtagccatgaggacggcaatgatggtaggctgaaacaaacagtgaaaaactttcggaggcaccatgaaagcgagcatcggcgatgtggcactgaaggcaggcgtatcgaacgctacagtctcacgcactttcgcacaccctgaacaggtgtcagaggcaacacggctgaaagtgcaggccgcagccgattcgttgaatttcagcgtttccaggtcggcaggaattcttaaatccggtagaacctatcgcatagcattattggtcggcagcggcatcatcgaatggttcaccgccgaaatcattgccggacttaacgatgttttgcgtgacgccgggtacgatctggtcatctaccccatcgaggggtcggaagcgcgtgacgcattcttcgaggaacttcccgtacgcagcaatgcggatgccgtattcgtttcctcattcggcatcagccccgacgaggtcaaacgtctcggaaccgcaaaaattccgattatcggcatcaataccaccagcgaaggattcgatgcaactgtcgggatcaacgacaaagaaggcatcaaactcatcgttcggcatctcgccaagctgggacatcgtaacctgctgtatttatatgaaagcttttcctccacattgggattcagctcatttaaccgcatttccggattccaagaagcctgcgatgcgattgacggattgaccgcccgcacactggcagtgcaaaaaggcgacagcattctggatgcggcaatttccgaaatcatggcgcaagacaacccacccaccgcattgtgtttccatcaggactcacaggcaattccattgttcttccgccttcaacgcagcggcctttccgtgcctggagatatttccgtaaccggatttgacgacagcaccttcgctaaggaggctgagctaaccaccgttcgacagcgcccatacgacatggccgtcgatgcggcacaaaaggctctggcgctaatcgaaggacaacccatcgaggaaccattcgagacattccccgttcaactgcaagtacgaaactcaaccgcaaaaccacgcaccgctcccctgctgtaggccgcagcgtgtactcgcgtgaaatcacttcgcgtaataccccacgccaaccggtctatctgcgttatgtatggcagattttgcttttcgtacggaaacatctcgcttatatatggcacgtcgcctgcgaaaacagccacttcgggggtacgtttttgaggttttcgccgcatgtgtctgccatatgtaagtgagatgtctccggtcaggcctccgaatctgccatacatagacgagatgcgagccgcagacaagcctcttcgtcttaccccggcgttcaatgtgcttttcttacggcgttcgatgtacttttcttcacacgcatgtacgtttaatcgcctcaagcaccgatgcgaatcaaactcaccaatgttcgcaccgtcaacggcatacgccaagacagcgacgcgacttaacccaaaccgccaacatcagtagtttggtagatactcgcgcgcatagccgtccacacctccattggacgagaggaaacgtggaatagagtcattgccttttgtcgaccatcatggcgacgcgcgcaaacagataacgctaaacttgtctcatgttgattatttgcttaacctagcgaagcgacgaagcgagagcaggcgatatatggtaacaatttctgacgtggcgcacgcagccggtgtttccaaggcaacagtctcgtatgtactatcgggagatcctcgaatcacccaagctacaacacttaaggtgcaacatgcgattgacgaattaggctatacggtgaaccatgcagcccgcgcactatccgtaagaaaaaccaaaacaataggtgtggtctcccccgcctttcacggcaactatctgtcagccctctttggactgtacgtgtacctgctatccgaagaagcgacaaagagaggatacgacaccctactcattggcgagaacgacggcttcgaggcaatgcatgaagcatggtcgtcaaagaaagtggatgggttcatcctgatggacatcaaagatgaggatccacgagtcagctatgccgcaaaagagcacattccgaccgttgcattcggctcgccaaagaactcacacggtttggatacagtggattccgatttcgccaaggctgcatcctcaatcttgaatttcttagcctctgaagggcataaagaggtgattcttattccatggtcacacacaatatttgatcagggtcttggctacgcttggcgctttctggattcagcgatagagaccgccaaacgtcttgacctgaaaatgcatgtcgaatatccgaaagacgacgattcggatccttcgcccctcattgagcatgcactagatacgcacaccaaagcgaccgctctgatacttcacaacgagccagcaacaatcgttgcccctcaggtcttggcacgcaggaatctccgaacaccggataacttgcaggtcgtaaccgttttcccgaaacagctagcaacatcaatgaagatatcgttccctgcagtgcgtccggacattacgcaactatcagaagccgccgtgggaacccttttgcgtcgaataaacaatccgaaagccccgacggtcacccgctatcttgattatccactaacccaagagcccgagtaacatcgcagctacgtagattacgcgcagaaaacaaccacgagattctacattagttaagttcgtcgatttgacttttcaaagatcagggtttattatttaacttgtttaaccggttcaacagtttgggattaaaacttcccaaacgcaataaattaatcattcggcgcataggtgcgctgttaatgaaaggaaataccaaatgatcggttcaaatatgaagcgcgtgatagctttaatcgccgcaagtgccgcggcagtcagtctcgccgcttgcggtagcaactcgagtcaagattccaaaacaatcgaattctgggacccataccctcagaagaacgatagcagcacatgggcgaaatacgttaccaattgtgctcctgagggatataacgtaaaacgcatcggctatgcgcagtcagacctattaaacaatctcacaacagctgtcaaggccggcaacgcacctcagatcgccctgattgataacccaaagatgcctaccgctgtcgacgcaggacttgtcacggatatcgaggcagcaggagtcgacgtttcaggtttcgacaagaatatcgaaggtcccggcatcatcgacggcgtacaatatggcgtttcttacggcactaacgcattgggcttgtattacaaccccgatgtcctcaataaggccggcgtcgacccagaatcgatcaccgattgggattcgcttaacagtgccatcgaaaaagtagtaagcgcaggatataagggcatcacattctccggcatttccggcgaagaaggaacattccagttccttccctggttctggggagccggcggtcaattgaaggacgcttcaggttccagtgccgagcaggatgcgcttaatctggtatccggctgggtccaaaaaggttgagctccgaaatcggtcgcaacagacaaccaatctgctgcgtgggatctgttccttggcggcgactacggcttctccgaaaatggttcatggcagatggagtcggccgccgagaaaggttacaagatgatttccatcccagccaaagatggcggagtagccccggttccaagcggtggcgagttcattaccattccaacccagaaaaccaaaaacagtgacaagatgaaagcaaccgcggaagtcattcaatgccttattgacggagataatctcaagaagacaaatgatgagatggtttatcttgccgctaaaagtgacgtccgtaaacagcaggtggaagagaacagtgcctgggcaccttgggttgacgccgtagaaaatgctgaaggccgtaccactgacgttggcctgaaatacgaagacatttctgcacagctttccgaagatctacaggctgccttgaataagggctgattcgcagtcccacatttttctggggtatctgtccgccattcattgcgatagtcagacgccccattccatcttttccatcaacagacaggtgaactatgtctcaaacaatcaccgcagataaaccaagacgaatcaagccgaccacattggccgccattggtttcgcggccccgctgattatttacatgcttatcttctacgtttggccgctgattcagaatatttccatgagtatgcaccgctacacacgccgcacttttgtgaccggcgatgccccttgggctggattcgatatctataagggaatattaagcgatcaacagttctggactattctcggacagactttgattttcgtattcgcttctatcgttttccaatactctatcggcttggcattggcggttttcttcaatcagaatttcaaactttccgcggctttgcgcggcgcattccttgtaccatggttgcttccgccaatgatttccggtacgatctggcaatggatgatggacgccgatagcggtgttattaataatttcctcaaactatttggtttggacccggtttggtggctgcaagccgatcattccttgtgggcggttatcattgccaatatttggcttggtattcctttcaatctcgtaattctgtattcgggcttgcaaaacatcaatggcgacttgtatgaagccgccgcgttggatggctgcaatgcttggcagcgcttctggaagattactttcccgttgctcaagccggtatcgatgatcacgctcttgctaggtttcgtctacacgttacgaacagtagacatcatctggattatgaccaagggcactggatcttcgagaaccttggcaacttgggcttatgagatggctttcggaaagggcacatcagcaactatccggtattcggaagcatccgttgtgggcacgattctcattgtcgtagcactgattttcgctctgatttacctgtgggcccaacggaatgaagagaagaggtaactaaaatgaaacatcgttcatcatggtggaaaacacttataggcatcattttgacgctgattatgctcttccccgtatactggatgatcaacatatcattcacgcaacgtcgctccatccgttcgggtgatctgttcccgaaagatttcacgctcgaaaattatgcttctgcgttaagctcacagctcccctacctaggaacgtcattgctggttgccataggatgcgtgatcctgactctagcaattgcattaccttcatcatacgccattgttttcttggagttcaaaggctcaaaatccatgaacttcctgttgattgttgctcagatgattcctgcggtcgttatgtctctaggcttctaccagatctacaatgacatcggccttctcgacagtattccgggacttatcgttgccgactccactttgtcggtaccgttcgcggtgattctgatgacgggatttatgtctggcatgccacgctcgctggtggaggcagcgcaaatcgacggagcatcacagtggggcgtttttaccaaaatcgtgattccactctcccgtaataccattgtcacgacttcgctattcgctttcctctgggcatggtcggatttcatgtttgcttcgactctcgattccggtggcggcaagatgaggccaatcaccatgggtctatatgactttatcggttcgcaaaaccaagaatgggggccaatgatggccaccgcagtattggcctcagtaccaacagcactgttgctgattttcgcgcagaaatacgttgccgccggcgtaacagccggagcagtgaaagactaatccaacccttaaatacataattaacaaggaccagctatgagtgaactaacttttgctatcgatggagatgcactgttgtggactggggacggcgaataccttcgcatcgaaccatggggaaagaattcagtccgcgtccgcgcctcgaaaatgcatgagatacaagaacaagaaggagctctgctaccacaaaacaatcaggcctcagacagccacaactatggtatcaccattgacaagcccaatagaaccgccgaattacgcaatggcgatattgtagttcaagcgaaagcatcctgcggcctatactccggatcaggatatgaagagccacgctgtttactgagcttctataaggcagacggcacaccactcattcaggaaataccatctggcggatcactaaatcttcgagcgcgatggttcaaaccgatcaccggaggcgactattccatcgtcgcttcctttaccacaccggaaaatgagaaactatatggtatgggcgagtaccaacagaacatcctcaatctgaaaggttgcactctcgaactcgcgcatcgcaattcacaggcatctattcctttcgtggtttccagcgccggatatggcttcctgtggaataatccggcacttggaaacgttacgttcggcaagaaccgcacggaatggcgagctgaatcagccaagcagattgactactggattaccacaggcgatacaccttcttcgataatgaagcattacgccgacgccacagggcacgctcctcacatgcctgaatggggactgggattctggcagtgcaagcttagatattggaatcaacgtcagctcctagacgtcgcccatgggtttaaacagcgtaatattccattggatctcatcgttgtagatttcttccactggccgcatatgggtgacttccgttttgagaatgaattctggccagatcccaaagctatggcggacgatctgcacagcatgggagtgaaactcatggtatctgtgtggccccaggtcgcgctcgcctcagagaattatgttgagatgaagtcaaagaaccttctcgtgcgtgcagataagggtgaagacgtcggcatgatgttcgaaggtcccagccagttctatgacgccaccaatccaaaagctcgtgaatatgtttgggagaagtgccgaacaaattatgccgagcttggggttgatgcattctggctcgatgaagcggaacctgaatacggcacgtacgatttcgacaattatcgatattacgccggcccaaaccagcaggtggcaaacatctacccaagagactataacaaaggcttctacgaggggcaacaaaccataggaagggatggtgacatcgtcaacctcacccgttgcgcttgggctggttcgcaacgctatggttctcttgtttggtctggagacgttggttcgaccttcgccgacctccgtgcccagattacctgcgccattcacatgggcatggccggtatcccttggttcaccaccgatatgggcggtttccatgatgggataattgattcggacaatttcaaggagttgttggcccgctggtgtgcgttctcatgcttcctgccggtcatgcgcaaccatggcgatcgtagtctgcatacggcaaccggcaaggagaccatcactaattcggccggagaccaccgttcgccaagtggtgccgacaatgagccttggagctatggccccgagatggagcaaatcttccgaaagttcattgccattcgcgaaaaaatgcgcccttacactcgagaactgttcgaatcagcacatatcgatggccagcctttggttcgcggactcttctacgagttccctcaagacaagtcggtgtctgatatcgccgatgaatacatgttcggccctgatatcctagtggcccccgtagttgaggccggagctaggtcgcgtgaggtgacgcttcccggaaacgctagcatcacatggacggatctacgcaccggcaaagtgtatgaaggtgggcagaaaatcactgtcgacgccggaatagacacgattccagccttcgcgcgcgacggccacgaccatgggctgatcggaatgctataaattcccacacaggaaatgtggggcgtccgtttccaaggcgaacgccccacactctgcgcatttttcccatttcaaccggtctatctgcgttattatggcagatttgtagcgggctttcgatcaaacagatgttgagcagttttacatggcatttatcaaagtttttgctttccgccgctccgcactcaaagaattcagccagaaaataccgaccgctttttgcagccgcatcaattaagtgcctgcaaaaagccattcaatacgttgctgtcagcaacacctcggaaagcaaagtaaaagttgtggccaatatattcggagacatcgccaagcaatgcaaccgtattaaaattcggttcgattaaggttcgataaatctacctcaccatttttgcttatggcgagtcaaaatgcatccttcccacatggctttgctgctttttgtatcttttgttgttatccgttgccacttgtcggtagcggcacggcacgtcagtatcatgtgcgtatgcgacttattggcaatattctgtggctgattttgggcgggctgctgctcgccgccagttgggcgattatcggcctggtgctgtgcgtcaccattgtgggcattccgctgggcattcaggcgttcaagatggcgggactcacgctgaccccgttcggtaagaccgtggagtatggcggaggtgtgggatccgtgttgctgaacatcatctggttcatgctggctggtttgtggatggcaataggctatgtgttcgccgggctactcaactgcattaccattattggcattccgttcggcattcagtcgttcaagatggccaaattagcgctatggccgttcggctcgcaaatccgcagcttgtaaatcacttcagatcacttcacccaacatagacggccatcgactgccgtcttgcatataagtatcgaggagctgcggtctgaacaggccgtgaccactgtaccctaagcaacgaaacacgtctcatttcgcttatatgtggcagatttcaggagatgaaaacttccatttcgcttatatgtggcaggtcgtaataggaaaaagccacttcgggggtacatattccgcagttagagggtatagctctgccgactatctgccacatataagcgaaatgacatttttgcaccggccaaatacgccacccgtaaggcaaataaggcataacctgcgcacagcgtttgccaagcccgacgaattccattggccccatcactgatttcaccactagttgcgcgacatatttcattcgcttatggcagctccagagcggcaaggctcaaaaaactgaacagtcgaacattacctacccaaatgattgctaatgccaaccgccttgtggacaggttaaagaatacttgcgatagcggcttctctaaccgtaagttatctagaagaagacatccgcaccccgtcaaatatggttacttgcgcagcttgcttgccgcgaagataaacaatggcagcgcggcgaacgcgtagttctcacactggatatacaggtacacgatcaggacaagccagcagataacagtcttgctccaaacaccatgcccggcagctgccgtatcgaagacacgcgtcacggaaactatggaagcgatgaccagcagaaccaggccgatcaatccgtattcggcgacaacgctggtatacgcacacatcgtccatacggtgtctgcattcatgccagtcgcgaatcccaccgcagcacttccattcatgcccaggtcattcaacaatcgtcccgcgtgctgcgcgccggcccataccgcgttgatgatgttgccggcgccatatccggtaagcaccgtccacggatgggcgagcagcccgcatatcggatcaagactttggtagattcgcgcgaagaacgatccgtctccttcggcaccgttttccgcaatcgaagatagtcgggaatcggcaagcacgcccagcagaccaagcataaccgcacccagcaactgcgcaataccacgcacacgctgtttcttgtcgtaccacgaattatgcacaataatggcaaccagcaacgccaccaccgaatcaaggacgatccgggtgccggcctgcatcagcacagagccaatcgcatacacaacgatgaggttgcgcaaccgcttggcacagatacggtcacgcccacgcataagccacataagcggcagcaatatgccgaacagatgcatgccgatatagctgggctccgcgaacaggaactgcgggcggccaccgccccacaccgagctttcattgatatactgccggtacatgaggtgcgcgaaatagttggtcaacggcttgatatgcagatggatggatagccattgcaccacgcccacgccgaaggagaaccagtaggaagcgatgagaatccgcaatggcgtacgccacggaatgcgtttgatgtcgaacgcaatggcgatcgcacccaaagtggcgagcacgcccaataatccggtgatgctcatgaacgcggcgttgagatggatgccgaatttcagccatcccgggatagacaggattatgcaggccaccggcaggaggaacattggcaggtaccggttggctgcgatgcgcagttgacgccaattgcataggcagtacacggcgaacagcgccggactgattggcgaccagaacggcgcgtacaggccgagcgtggtgccgtccaccggaagaaaagcgatggccagcagcagccaaatgacgttgcgttcctgcgttgtcagaaatcgcaggaacggccgatattgcggccggccatgatggttgcccgcgtcaatggtgttgttgtgtacgcatgcctggttcatgtgatttcccctccccgtcaaccttactcgttcatcatgatgtatggtgccacccgttgttcatttgtaagtgcaatgccttcgtcaggcttgtagaactggcggcgcgtcggcgaactgctagaattgcaggaccaacatgggcgttgcacttacaaattgaatccggacccttcgtcatatcgctgtaacgtgcgacttcgtgcgccactaccaatcacccgcgatggcgcgcaatgtcgcgcatagctggaagccgcccgcctatacgtgtttcgattcggttaccggtggacgcgaggccgtttacaaagcatgcctatcttatgaatcacaagttttcctcgttttccttcacaccaaaacgcggaggcttggtgatgcgagcgtgccggatacattaaccgcgctacaccgcagaatcttgccgagacaaccataaccgtgccatgcgcggaacgttgaatctcgactgatgcttcgtttccacatggcctctagggaaggcaggaaacgtgactcactacgatttactcatcaaggatgcggatatctgcgtcatggatagcaccatgacacgcattccccaaggttgggtagccgtgaatggcaccgatatcgcagcaatcggccaagggacaacaccagagaacatcaccgcttcggataccatcgacgcatccggtcaggtactattccctggtttcatcgacacccatacccatatcttccaatcattcctcaagggattgggcgcagaccatcgcctcatcgaatggctcaacttgtccgcgctcccttatggacagttcatgactccgtaccagcagcggctcgccgcacagttaacctgcatggaagctatcaaaagcggatgcaccacgctctgtgaattcttctacaccaatcaggaccccgagctggcagacggatgcatcgccggcatggaagacaccggtatccgcagcatcttcatccgcaccttccaagactgcggcaaggattacggcatgccggcatgcttcatccaaccggccagtcaggccatggaggaagtaagccgtctgcgcaaaacctacgccaatcgaggtgacatgctgtctatctggaccggcccggacgtgacctggtccaccaccaaggaaggctatcgcacgatgctggagtattgcaatgccgaaaacgtgcgctacgccatgcatatcgacgaaactgaagtcgatgatgacatgtgccaacgcaactacgggcaagacatcgtgccgatgcttgacgaaatgggttttctgtctgacagaatgctcgccacacactgcgtgaaccttacgaatgatgaaatccgccgctttgccgacaatggcgtttccatcagctacaacccagtatccaatatgtacctcggctcgggcgcggcacctattcgagaagcgctcgatgtcggagtgaacgtatcggtcggcaccgatggcgcggccagcaataacaccacggattatctggagagcctgaaattcgccgcgcttatccagaagggattcacccgtgacgcagcccgcatcaccgcaccacagaccttgcagatggcgaccaacggcggcgcgaaggccgcaggcatggaaaatcgcctcggcagcatcgaggtaggcaagcgagccgacatgttcctgtttgaaccgcgaaagctcaaatccacgccgatgcatgacccttacgccacaatcatctactcttcctcccaggaaaacgtctccactaccatagtcaacggcaagatcgtctacagcaacggccaattctcctgcggtatcgaggagcgcgacttgtccgacaaaatcaacatcgaacttgacaaactgcgcaagcaggttaccgcactataaagtccatatatcaatatttacaaccacacgaaagctgataactcggcgtgagcctaccctttttcgccccatccgagactcactcatctcgagacaccatacacggcatcatccaaatcagccttcccatccatcagagaggaacacatcatgagcaaagaagaagccccacaactcgtcgcgggaatcgacgacaaaattccggtcggcaaatccatcgttctgggattgcaacacattctgtctatggatctgtacatcatgccgctcatcctcggaggagccatcggattgcagggagggaacctgtcgttcttcctgcagatgagcttcttcgcatgcggcatcgccacgctcctgcaaagcggcatgttcatgaagtaccccatcgcgcaaggtccttcatatgttccactcggcgcgctatgcatgattggagcgaccatgggcattccaaccatgatcggcagcctcattccgggtgcgcttatcgtcatcctgctcggcgtgaccaagctattctccaagtttattcgcaaagcgattcctccgttcatcggcggcatcatcatccttatcgtcggtttgaccctggtgccgactgcagttaccggagtgttcagcactactggcaacttgaccgtcaatgcaataagcggttccgtcacctttgtggtgctgctactgtgcatggtgctgcaatattgcctgaaaaacagcggactcctgcacatgtgttcagtaatcatcgcgcttgttgtgggcacactggtcgccgtgacaatgggcggagccgatttcagctccgtttccaacgcggcctggttcgcgctgccgcaacctttccacttcggcctgccacaatttaatttgagcgcctgcctgctgatggtggtcgtctacctattcgtcatgcttgatacaaccggcacctggttcactgtcaaagccatcaccggcgctgacctcaatgaccgacgcatcgatcgcggcaccatcggcgagggcctaggctgcttggtcggcgcatgcttcggcggcactccgatgaccggatattcgtccaacgccggtctgatcgctatcaccaaggtcgccagccgcagggccatgattgcgggcggcacgattctggtagtactcggtttctgccccaagctgatggccatcatcacctcgctgcccacacccgtaatcaacggcgtatttgcaatggtcgccatgactttgattgccaacggcatcaagatggttaaagataccgtgcttgacgaccgcgccacactgattcttggcgtcgctgtgatgtgcggcgcgagcacgatgattctgcctgatgacgtagtatccgctgcaccgcagttcgtgcagttcttcctctcctccggcattgcggtcggcggcacggcggcgattctgctgcaattactattgccgaagaccgtttcgctgacgggtactgctccgaaggccgcatcggcatcgacagcagcatcggcttcatcggtctcgaacaaggagcgtgttcaacaagtcgtgaatgcgtgatgcaaagcgacctagactagagatatgctcacccattacaagtccataactatcatgcaggcagccgtcacagcagctgcctgcatccttacgctgtcaatgtctccgtacagcatatacaaacgaaaccgacggcacagtaaccccgggttctatatagaagcgcaacacctgttctatggttggaagtgttcaagtcctaactcaagaaggtgttgcgcttctatttagaacccgggcatccgcgacgggctgagggcgcattggagccccgagcagatcgccggcaggctcagggcggacttccccgataataagggcatgcacgtatgcgcggagacggtctaccaggcctggattggctacaatgtgttagacagtccgatgagggacgaatgacatgagatcggaggccgacgatggccggcccgaaacatccccgccgctacgacgaggcgttcaaacggcggatcgtgcagtcgtacgagaacggcaagccgccgtcgcagatcagggccgggtacgacatcgcgcgatcggccccgcggcgctgggtccagggcatccgcgacagcggctccacccgggccgcggacaaccggacgtccgggtggaacgagctgatcgagccgaggaaacgcaaccgccggttggagatggaagtggatgtttcagaacaggcggcgccggtattcgcacgaaggcaggcacggtacggtccgacgccggccgctgcccgatatcggcgcagtgcaggatcctgggcgttgccaagtcgacctgctgctggatgatcggacaccccgagaccgagcgcatcgacccttatgacaaggacgtggagcgcgtgtagcgcgacagcggcagggtgtacggggccgggaagatcaagcacgccctggggcagggggcgtggcgctctccaggcgccgcatcaaccggatcatgaaggggaacggcatggccggctcctattccaaggccgcctacaggccacgcccggccaggccgaacgacgacccggctcccaacatcctcgcccgcgagttcaatggctatgcgccgcgcacccatctggcctccgacccggcctacgtgagggtcggtgcctcatggtcgtacgtctgcctgcccggcggcctggccaaccggcagatcgccggccattccgtggaagtcgggcacgacaccgacctcgtgctggccgcgttcgccgcgccgcgcttccccctgacggacatccaggtgctccgcacggaccgcggcggcgggttcgccggcgaaaggatggagcgcatgctcgccgagttcggtatcacgcgttccctttccaggcccggcagcccgtacgacaacgcggtggtggaatccaccgaccgtctcatcaggaaggaactcatgtacgacaacgtctgcacgagcgtggaacggctgcgctcggacctgaacaggtacgtgtggtggtacgaccaccagcggctccactcgaccctcgattacatgagtcccgtggagttcacgcaacaaggaaagaccctccaggaacagtccaacacaccgttgccaatccacgcgctcgtcgtgccctctaatttacacatgatgaagaatttaggtaatactttgctgtgtcgacctctatgccgccgtctttattccggcagacaaagatgacggtgccgacgatgacggtggcagcaaggatggcgagtctggtttcgcggcgttccctagctgccatatcggcatatcggttggctaggacttcggcttcggcggcgacgccgctggcggcgatggctgcggatgattattcgtgatgtttggcagtgggtgttggtgccagatttccaccgcaccacagcctccaaaaaatcagatgaaggtaggccagaagaccaatgacaatcgtttgaatgtccatcagaattggtaaatagtgcctttctaggtttatagatgtgcggtaggacgagggataggagtttctattgtgcctttatcgctaatcttttttgctggaataccagcccatgttgtattgacagcattaatgtttttgatgactaatgtcgtggctcctatacgaacattattagcgatatgtatgttacctaaaacagcgcaatctatcatcaactcaacattatccccaattgtggggcacatgttatgagcctgtgcaatgacaacgccactagatatgctgcaatgttttccaactttagcattaggattaataattatcctctgcggatgccaaatcaccaatccttcatcaaatacattaatagcaaattcagaacaaaacctatcttctagtcttttaagctgtaacttgcggcaataataagcaactttatgatagaaagagtttgaggaaaggttaaaatgatattcacataatcatattaaagtttttattctataaatagggtcaaaatgacgcaatataatgtttgggtgaggtggctgagcttcccggtctgcatagagatatcttttgagatcttcctttgtgtgaatcatttttcctatccttttcaaaggtgttatatacgtatgccatttctattttttgctgcgtagagcgcagcaatgagatgatataagttcaaacgaattaaaagccatcgaatacgagcaggaaaagatagattactcatttttttcaaatctttacgtacgccgctagtggacaacgcgcgatatatattcgtgaaagatatgccttgtatcacacatcctccaataaaacgaaaaacagatgccacaaaagaatcatcagcataatgctgatgattcttttgtgtgttctttaccttaatgatacgtttcattgccatgagaacaatatgaatatcgacaaaataagaaagtgacgcttttgcgcaaaccccattaggattaataatgtaataatagactttatctgatgacatatataccgtcgagacatgctcaagatacttgagtgcaaattcaagatcttcgcccatagaaagcattgtattaaatgttagaccataagcatcgataatcgatttcttataaatcttattccacggaggattaacacgttgttgcaataccgtgtcgatataatcgtcaagaggtatgaatcccctttgaatgccaaataaaccatcaatgaaaccactctgatgcgtaccctcaaaccagttcatttgaattaaatctgcatcagtatgctcgcaaagataacaaatccgtgctacatattctgtagatatgtcatcatcactatccacaaatagtatgtagtctccagaagcatgctgtaaaccgaggtttctagccgcgctaacaccttggttttcttgatgcagaacagtaagacaactatgtttactggataaaacttgacatatggtgtaggtatcatcttgagatccgtcatcaacgacgattatctccatgcggccataatcttgtttaataaatttattgattaaactggaaatagagctcccagcattataagcgggaattacgacactgaacaaagggttagaagtcatttattgtcctcgtaatcactaatgaaattatgcgctatgtcgcccatgatgaaagatacgtgaggtcaacttttcaaaaaattcatcatgaattactttcagatacaccattgagccagaaagatataggaatccacctactagaatctggataattaacgtaatgatcgtattgcccatataggcaccaatccaatatacaacagcaaacattatcattccaattgggaacaagaaaagaactggctgtaaatattgcgacataggaaatgatcgacgaacaagtattagctgtacaaaaaatactgtaaattcagcaataattgttccaatcattgcaccaataccggcgaattttggaataagtatgatgtttactgcaaggttggcaagtgcaccgataactgaggaaattacataaggcttatctaatttattgggaattaaatactgagtacgaatgacatttgcccaagtgacgaatataagactaaaaccaaggcctgcgattatcggcgcactgccaacgaattcggaaccaaaatagactggagcaagtacattacatattccagctaatccaaatgcagctccaactaccagtaaggtaaagtacctgactgagattttatttaaataggaaatgcgatgctcgtcacctgttcccaacaaaacagtgatgcgaggcatcattacagttccaaatgccgtaatgagactagatggtatattaatgattttttctgcattatcaaacaagccaacttgcgacatggaagacattgcgccaagcatgactttatctaatagtttatatatgctatatgcaattgcaggaatgaaaagcatcagtacaggtttaatattggacttaacctgagaccatgaaggtttacagaaatcagcgtacttccgaatacggagccaaagatatatttgactaaataacatgccgcatgacataatcagagcgtatatccaaaggtcttcgcgggatcgaacaaaaataaagattgccactacagtagcaatctttataattgcattcctagtgactgttactgcaaattgttctaagccaaagaaaaaccaagttatatctaagacataagataaaacaattatgctttcaatgtatgcaattgttttatctcctgaaaaccaacaataaataaaaagaaaataaagaagcaaggcaataactgtggtgcataactggataatataggtattactgaaggcttccgataccttttgcctattatctcgtactagggcaacactacgattgccatggtttgctattccaagcatgccaaataagccaaaatatgtaacaatggaaaatatataggaataagttcctagtccatctgccccaagtactcgtgatacgtatggagcggtgattagcggtaaaataataacgagaatttggtaggcaacattgtatgctaaattcttctttagagaggacatgagctaaacttcctgttgcttcgtgacgaattgaacaatcatatcaatgattttttgatcaatatctgaatcaaacttccgggcaaataacatccctgaagaaataagtgcaccatagtctttttgtctgaaggtatatggattacctcgttgccaatcgatgcagtaacgaatcgaatcataactatcgcaataatttggtgtatatattctgttcttaaaatacgagttggcaactatggtttgcagcataaattcatctccgcaacgtgtgcgtttgaatatatgctctacttccttacgctgagagacgacatatcgtgcgagttcatcagtaatactgaaccaattggcgcctttttgatatttgatgccatagcggcgtccacggtcaacccctatttggagcgttaatataagacgatataatgttttttcaataatatttttatgacgtccggaaaagaatgcatattttgatacgcgttcataggttgaacgatccaagatatgtttatcgaaatgaatgaattcagtaccctgatgctcatcaaaatagttatgtatggcctgttgagaagcaagaggtaaatcggcgccagataatagatgataataagagtaggtcgattcagatgttgctgcttcaagaagacgcaactcacattcgatttgcgaaaaatccccccagcgaacatctacacgattgcgaagaactactaacttggcattcctgacttgcgcacttaattgatgcttaattccatcaaaatctttatattttgcatcaatatgcaagaaaatgtcattgttcttgtagtccaaacatcgcatcagcatcctcaattgctcaggatgctgatgcgccataatcaaatatgcgtgttgagacattagttcaatgaatccactacagattgaagatactcgaacgaatgaattcgaagtggctctaatttatcaggcagctgcgtatagtctaccggttcaaacaaatcaagagcagaaagctcagcgatagtacggtatcgtgacatgagaccaagctgtgttaagaatgagctcgcgcgatcatcgagcgaggactcgctatgcttgctgcggatataccagaagttctttcggtaaattgtgccaaaagcagttccgtggaacgaacttgtgacaaagagttttgcatgcttgaccacattcatataaacgtcaggtccataagagcgtatgagtctaatgtcgttacgccagcacatttttagagtccattcttttgcttccatgaaatacacaggcattccggtcttcttagaaatggacttcaggaaatgttggacttcttcggtgatgctgaaacagtagtagaagatataatctccactaataacaggtgtatcaccaacgtcgacaagttgttcccattcgctttcattaagaagcatggtgggatctaggcagataggtacttcgacgccagttgcttccttgatccatttctgtgcattcttttctcgaacagaaattttgtcaaaatgttcaagatagttctcataacgttttgtatcgccttcaagaatgaaaggattgttagcgccgaaactcacagcataggcaaatttgggtcggtccttaacgaacgagaggtagtatgcatcatccgcatcaatgcacttgatattccaaacttgatcacttccggttatgaaggctttatacttatcggcgagcggcttaagttcttcaattgaagaatacgtatcagaggacatatggaagtatcgtttttcgaatgcttcataagagtcgtactggtgtttcatttgactcatattggtggaccaaatcaggcttttaattgcttgtttccagtttttaggctttggaaccggtgcgtacatattacgctggccctggttggaaaaatcaattaactcagtcttttggtggaaatggttttctaaaatgtgttgaagcgccaaagcctgaagcatagagccattattgtgggacgcatggaaagtcatcataccgatggtgtctgcgttcgttgtcatattgtctccttaattgattttgaaaaaatattcgaatattgattattgaaatatccgctaatagccacgagaagaatgagaagataaacataattttgcatgactccagcccagaataaagttgtttcaaatagggctgagtataggcacatgattgttaatgaaattgtatgctttcgcattgcacgcaattgaacatgtcttagtccaataaataggaccaatatcattaaaatgtatagaataattccaataaaaccagtagtaacaagtacataaacatagctgttgtcaagccaatatgttgggtacggggttagattcatgccataaatttcattggaagctaatccgagtcctatcatcgtacgtgtgcttgagaagaacgttggtaatgctacctcaaacaatgtttctctgttggattgattcaacaaatctgttaatggaatattggaagctcctgccacaaagaaaacaaacaagaaaagtaatagaagacattcaagaagtaatttaaaataacgtctattgggtgtttctttcagcgacatgaacccatagcagattgcgtacacgatcaaacttgaaatcgcattacgagaggcgcttcccaacagcatgagaacacttataagaagtacaatcacattcaggatattatgcttaaaaggaatgagatgtcgagctttgagaatcatccaaatgataatatggcatgcgcaaaatgctcctagagcattgtaatggctaaaaccataatctgctcttactcgactcgaatcactgaatactgtcaaaggattaagtaaaccgagatcagttatatgagtagcaaactggaaaaataaaataaaagaaaatgtataaaatgctgtaagcaacattttatcgaatagtcgatatgccactgttacagagaccgttgaaaacacgatcataagaaagagcatttgcctgagtaagataccgttcgtgtattgcgctaacggtggattaacaaaaatagcaccgaataatattatataaataatcagcaaggcagataatgccgttgaccaatgcatagtgccgatttttttagtacttatttttttactgacataaagacctaacatagataaagaataaaaagtctgtaccgcagtagtattaagaggaacgtaattgaattcagtggtaatggaggctcggctaagtaatataaatgcaaataatatcatgcatagcttttcttgcgtgatatggaatctagatatcgttgacatagtcacctcctatttaaattatcaagtttttttattcctatttaaaatagatcagattttattgcgtattttataagtcataaatatgactttatataacgttgcatttatcaaaaataaatggaattggatacgttttgcttttgatatgtagtttgcctgtgcaatgtactgtttttggttttgaatgatggaaatacattgcttacgaaatgcttccggacaaggtacttgattcttcaagtatgagtcataaacggtcagcgctgcagatgcatatgcagtatgtccaattacagataaggacggatagtttcgatctatataacgcatttgcttatatgcagcttcaaggaaatcatgattgattttcttacttttagtaatactgtttgtccgctggtagtagttgtaacaagcgtctgacacgaaggctaccttttgggcacgatcaaagattttgaacatgataaagaaatcttcgctaagcttgccaacggggaagcgtatgccatcgaaaagctcagatttgtagagcttgctccatgcacccatatcgaacagtcgataagtgttcatctctgtgattgcatcgggaaagtcaaatacttgatcaggctcgatatttgcctttggaatgactgtaccgttatcgaatacataattaataccgcatacagcaagaacgcagttattcttttgggctgcattaagcaatttctcatacatgaatggctcaatgaagtcatcgctatccacaaagcctaggtattcaccatgtgctgcatcaataccggtattgcgcgctgctgcaagaccggtattcctctgatgaattaccgtgattcgtgggtctttattggagtaatcatcgcaaatgagttcagatccatcggttgacccatcatcgacgacaattatttcgatgttggtgtatgtctgtcgcaaaatactatctagacatttagcaacatagggctttacgttataaacaggcacaacaacactgataaggggaagtgctgtattactcattgatcttctcctttgtaggtgttgagtgtttgtcgggtgatggcgtcccagttgtagcggccggtgacgtatgcggctgcgtcctttccgaacgcggcgaccgtgtctgggtggtcgaggagctcctggagccttgccgcgaggtcgtccacgtcgccctcgcggaacgtcacgccgtgcatgacgccgtcttcgcccctgagcacgtcggcgcattcggggatgtcgctggtcaggcagcagttcccgtagctcagcgcctcgagcaggctcatcggcatgccctccagatcgctgggcagcacgtacgcgtacgcgttggaatacagttccgccagctccgcgccctgcgtgaacccgacaagcacgatgcgcggatccgatccagctgccttcctgaccgactcgtagtattcggcggaatccgatgcgccgccagcgatcacgagcctcttgccggtgtccaggcgcttgaacgcgtcgatgaggtaatgcacgcccttctccggaacgatgcgccccaggaacagcacgtaggagtccttcaccagcccccacttcttcgcgatcaggtccgcagccaccgactccaccggctcgatgccgttcgggatcagacgcgtggaccggccgtacgtccgttggaagtactcctgaacgccgcggctcagcactatcacctcgtccgcgcacctggccgccgtccgctcgccgagcttcaggtacatggaggcgaatttgccccacttggcgcgctgccagtccaggccgtgaatcgtcgccaccgtgcggatgccggcccaatgcgccagacgcagcatgacgcagggaccttcggcatgatagtgaatgacgtccggtttggccgcgatggctttcagtgttgcgaagaatgaggaggtcagagccgccaaacctttcgcttcgaaagtcggcactggaacaacacgcacgccgttgtatacaaagggcttatttgcggaatgaacgtttccgtcaaattcggcacccgcaacattatgccccttgcgattgtatgcgataacatcatgcccctttgcggccatacgcgtagctaattcatctacaacgatttcgatgccgccttcacgcgaaggaatgcgcttatgacctatcatcacgatactaaccatcaccggtcgcccttagttattcagaatgccgggataatgccacaagcgttatgcatggcagcggattgcacagtctgaccactagccaaaccgacgtaacggccgttatcggctcttcttgcaatcgatcgacctgtggtcggcatgcgagtcccgtcctttccctccaaatgaaccccgaattggtgtttttcaagcgcaacgcgaaacgcgcaggaactgccaaaccccgttcattatctgccaaagtcgatttttacatccccctcagacacacccagccccccatcactcacttcgggggtattcttcacgggttttccatgaacactttgcttgttcgtgacttaaaaactgtgtttggaatctgcttcagtcggttttccggacgtttctaaatgagcgaaaagagccgataacggccgttatgtcgggtttgtcccggttcggggacggtaatccagtgccgattcgagtagcccaagtcatggggaaaatgcttggcggtggtgtcgaatccgtagtgatgaactactaccgccatatcgaccgcaacaaagtgcagttcgattttttggtggatgccgattctacccgcgttccagaagaggaaatcaaagcgttgggcggtcgcgttttccgcatccctccataccaacatccccttcgctatcgcaaggaattggtcaggcttttccatgaggaacactggccgatcgtgcacagccacatcaatacgctcagcgtattcccattgtctgcggccaaaaaggctggagtgccggtccgtatcgcccactcgcattccacgatgggcaagggcgagtttgccaagaacctgatgaagcttgcactgcgtccgctctcgaacctttaccctacagaatgtttcgcatgcagtgaatacgccggaaaatggctgttcggcagagacgctgacttcacagtgattcccaacgccatcgaactggagaagttccatttcgacccagtccttcgccaggaaacccgcaaggaactcggcatagccgatggtatgttcctgattggccatgtgggtcgtttcatgccgcagaagaatcaggctttccttgtcgacgttctcgccgagctccttccccagaagccggacacgatactcgcgttcgttggtgacggtccagacaggccagacgtacagcagcacgcccaagaactcggcattggtgaccacattctgttcttgggacagcgcacggacgtcaaccacctttaccaggcgttcgatgctttctgtctgccgagccgttatgaaggtctcggcatggtcgccatcgaagcccaggtcgccggatgcccctgtgtcctcagcgatcaggttccgcacgaagctgatatttccggaaaaacatctttcataagcttggaaaataaatcttcttggatttcaactgtactcaacatttcctcgcaaacagcgaatcggcagattgaaacatcaaatacatgcgctgaaaaatatgacatttcagctagtgcgaatcgtctgactttcttgtacgtaagcagtgcggaaagcgcgaataggtgggaggaaacactgtgaatcctcatgttgctgtaatcacttcaggctatttgccagtaccgaatgttctcggcggagctgtcgaagcattggacatgatgatggttcaggagaatgagaagactccgaattttgatttcactgttttttcttcttggacacccggcgtagatcagatagcgcgtacaggtaatttcaagcatactgatttctgctttatcaagacaccattgctggttcgtgcagtggatcattgcatttattgggcagccaagcatgtgcttcacaagaagaagctcatgagctatcgatatatcgcgcaacgcctgtggtatatcaacaaggtttccaagaaactcgcacagcccacaaagaatggcagtccggctttcgacaaggtaatgatcgaaaaccacgccacgctgttcatgaccatgcagaagcacggcaattccgaacgatatgcgggaaaagtgtattaccacctgcataacgaagttcttaatgatttcggctgcattaaagagatttccaaagtcaaaaaagtacttggagtttccaaatatattgttgacacgcttgacacgtttttaaaagagcatggagagcccggtctgcgcgaagatcagaaagctgtatggcgtaatggcgtcgacacaaaccggtttggttcagaagaggctaatagcaaggcgatcgaattccgacagaaattcaatatagctgaagatgatattgttttcctgttttccgggcgccttactccggaaaaaggcgctgaagaactattgaaagcgtttactgaagtagcgcagaaagttcccaataccaagctggttattgccggagctttcttctttaattcgaatatcgtaagtccatttgaacagaaacttcgcgatttagcttcaaatcctgttgtgaaagatcgaatcatcttcactggctttgtgaattacgaagatatgccagctatttatgccatggccgatatatgcgtattgccgtcaatttgggacgatccagcacccctcgcggtaatcgaaagcttggtttctggtaagccgctcatcaccactcgttccggaggcatccccgaatacgccgatgagcagtcagccatcatccttgaacgtagcgatcaacttgttgaccagcttgctgatgctatgacaaaaattgctcgagactccgacgaacgtgatgccatgggcgcgcgcaaaacagcattacgttccgaattcaataaagaaacatacatggcacaattagccattcgtctgaggtgactacgtgggtaagtacaagaatctgctagtcaatgtcggcatcttcggactcagcgcagtagccaccaaactgatggcattcatactgatgccgttatataccctgtacctatctacagaggaatacggcatcatggacatggctaccatcatggtaaccacattattccctgtactaactttgctcatcagcgaaggcatgctccgttttacgcttgatgataagtcaaaagccgcgttttatattaccgaaaccatgctggttatgttggcaagctgtgtgcttttggcaattattctgccagtatttgatttgcctatttttggtgggctaggtagatataaaatttggttcctgttgtcctatgcggcgttgtgtttcccctctgtgatgggtactgtcgctagggctatggatcagatgaaactcattgcttacgcctcaatattgtctgcgcttattatgggcgtgcttgcttatgtgttgattgccggaatgaatctcggtcttatggggtatttctactcttatatcgtaggcaatggttcagcgattctggtatatcttttcgccggtaagcagtatcagtttatcgattttacagtatggcgaaacaacgcgtctcttcgtaagcagctttggcgctactcactgccattggctccgaattcattgtgcaaccagattcagacgacagttagtcgtttcattattacaggtgtactgggtatttccgcttctggtttgtatgctgcagcttcaaagattcctaatttgcttaatgtgcttcaacagattgttcaacaggcttggcagctttccgcgttccaagagtttaagagctctgggctcaagcatttctatgatgtaatttggcgtgtgtatcaagccctgatgtcggtaggaagcgcgttagtgattgcgttatctccgttcatcgccaaggtactgatgcagcgtcagttttactcggtatggccgctaatttccgtccttgtattagctttctatctaggtgccatcaacaattttcttggcacaatttatcaggcttatatgcgtacaaagccgttacttgtggctacagttgtgggagctgcagcatgcctcgcatttaccgctatcctcgtacatgactggggtatttcagctgctgcattcggcgtgtttgtcggtagcttggtgattttcgtggttcgtgtgattgatgtgcgtcgtctgatggccatcaatatgaggccgattcctacggccattaccgtgatgctgcttactgtccagtccttggtaacctcgaatcaatgcagccattatctattctggtcatcgatttgtttgctgcttattacattcgtgcaatgttatgaacttaagcctcttattactctgatattcacaaggagaaagtacacagcatgaatactaatccatcttccatgcctgagaaaacccgaactgaagatctccccctgatttcagtgattgttcctgtgtacaaggttgaacgttatcttgaccgttgtatacagtcaattgtcgaccaaacatatcaaaacttggaaatcattctggtcgatgatggttctccggacgcttgccctgatatgtgtgatgcttgggtagcaaaagatcatagaattcgcgtcattcatcaggagaaccgaggattaggtgccgctcgaaatagcggaatcagaatcagcaccggagagcttatcggtttcgttgattctgatgattggttagaaccgactatgtatgaagtcctatatcgttctctcaccaaagaaaacgctgatacctccatgatcaccggtgtcttggaatatcctaacggacgacaaatatatctttatcatcctgatttacatctggtaatgaccacttcggaatcctttaaatacattaatctgccaggttattcgacaatctctgcttggagcaagctcatcaaacgttccactctaggaaatattcgtttcccggaagggtgcactggcgaagattggcaattcacctacgatatacttgcagcgagcgtacgaactacttttgattcaacgccgcagtaccattatcgacaagttgcgggaagcctttctaacacgagcacaaatttcaattttgctggttacgaagctaccaaaaacatggtgaaactggtacatcaaaaattccccgaacagcttccttttgcgttgtatggacaaatgagaagtatggtgagcctttatgatcaggctcttgtcacggggcatgctaaagaacagcaatggcgagatttcgcagaagacactcgcactttcgtcaatcaaaacatgaaagctgttactgaatccgtgacgctccctcgtgggcgtcgcctgcagctcaaactcatggccatctctccaacgctttatggcgtgtttttcttacttcataaacgtattcatccggaacggagcaagtgaaaaatgagcattaaacaacttgcgatgcggttagtctatggccacaaggcttcatcggagcaatacatatcatggctccgaagccagggagtacacgtgggacagcatgtgcatctatatacgccatggtccatcagaatcgatactcagagaccttggatgattgaaatcggcgataacgtacatatcaccgcagattgctctattttgcagcatgactatagctgggcagtaatacaacgccttacgggtgaagtgctgggatcatgcggaacggttcgtattggcaataatgtttttgtcggtcagaagtcgttgattctcaaaggagctgagatcggagacaacaccatcatcggagctggcagcgtggtgacaggccgtttggatgggaacgctgtatatgccggtgctccggcaaagaaaatctcttccttggaagcgtatatcgacaaacgccgcaaacttcaattaaatgaagccgtgttattagtacgtgagtacgagcagacatatggaaagcagccgccaaaaaagctacttcgggaattcttctggctgtttgagcctaggaacactcagctggatgaggtattccaaaaggttttccagcttgataacaataccgaacgttcacagcaagcgtttgttcaaagcgaacctatgtttagcagctatgaggcattcctcaaatacgttgaatcaaattcttaacagctagcacagagaaagaggcttctatgaaagactcaattacttcttacaccattacctgcagcagaccaactaattatggcgctgttctgcaaacttacggcttgaacaccgcactacgcaagatgggtgtggacgccaaggtgctggattacaaccccaaatactactacacatccacacagccattgcctattcgtatggtccgtgccgtcgtgcgtttccccgatttggccaagggacgcaaaatattcggtaagttcctggaagattatgtgcccatgagcgccaagacatatcgcactcttgctggaatcgaggctgatgtgcctcaagccgatgtttatatttgcggcagcgaccaaatttggaactgtaagaacaagcttaacggtaaagacgatgcgttcttcctgtcatttgcgcctgcgggcgctcgcaaagtagcgtatgctgccagcattgccatgcctgaaattcctgatgatcagaaggatcgttatcgtcggttgatttctaatttcgatgctgtgtctgtacgtgaaccgtcgtcggtgcccatgcttgaagatctcggcattagtaatgttcaatccgttattgacccagtatttctgcttgagaaggatgattgggacgtaatcgccgacgccagcgatttcattcccactgaagactacgtactggtatacggctacaaccgtcagaaagaggtatatgcctacgcacgtcggcttgccaagaagctaggcgtgaaagtctataccatcggtactgccatcgaagattacacacttgatcaggaccgttatttctggaatgcttctcctaacacttttgtggaccttattcgcaatgcgaaagccgtggtgacaaattcattccatggcactgtgttctctattgtgtacaacaaaccattccacttctttacagttaagcagaccacaaactcacgcatgctcgacctgctgaattcgctggcactaaaagacagacatgttaccagtggcgacctgctaagcaaccacatcgactatacacagccgaatactctactcgcttcattacgtaaacagtcattagcttatttgcatagcagcgtatcggaaccactaaatcagcaataatcaagagtccaaaggaatgtcattatgaattggaagagcactgtagaacagtggatgccaaaaccgcttatcgctcctctcaagaatctgcgtcaaagcattcatctatatcaagattcgtgggcacaagccaagcggtttaatcgtagctactctcgcattatgccccatgagcgagtaagaatcgagacacgagtgatgtttctcagccatcaaattgaaaaggggctgagccatcacaattttcgctatgggtttgggaaaaaagtttttaacgagcttccgaccctgcttacacgtctggaacaagcagatctgaatttcgctaataacactgtgtacaaagaaagtcttgctgcgcttcatgagtacatgcagcgtcatctcgatgcggagaaagatatttcttggcagcaatcgttatttactgcagatcagtggcaacgcattatgaatgccgaatcaaacgatggtggaagcatatctatccgtaaaagcgacaagctcaataacaaagatctttcctttgctgcgttaagtgaaaatagacattcagttcgtgaatttgctgatgagccggtgtccctagacgaacttaaccaggcaattcagatgtccatgcgcactccatcagtgtgtaacaggcaacccgccagggtgcatgtcattctcgacaaggaagtcatcgcagaggctttgcacattcaaggtggtgttaatggatatccagcccctcccgcattgctgatgattacttctgacttgcgtgcgtttatgacatcttatgagcgtaatgagggatataccgacggtggcctgttcggaatgtcactactattatctttggaatctttgggaattggagcttgtccgctcaataccatgtttacggcaactgcagaaaagaaaacccgcaaacttttgcatttgcctgataacgaagtacccgtcatgtatatcgaagttggacatttcttggacgaaacacgtacctgtcggtccactcgattccaaggctcagatattacctcggtcttgcagtaaccacagactgatattcccgttcgcgtacttgcatctgcgtgatcagatagtcgcataatcagcaaggagtcttccatggacgcactctctgttttcgtcactacatcattgcccaaagctggaacgcaagttgccggattgccattgacgctgaatttgttacttactgcatatgtaattcttcgtcatccaaaccgaactttattaatgatgcagaggtttcgcggattgactgcagtttacggagctctgttcgcatctggtctgtcagctttgtctcaagggcggatgtcttcagacatgcatggaaatggtttatgaagcgttagtcttatttaatcaactggatatacatagttgttctatgagatgttttttcttgaacaaatacttttgtgaatataatgtatcaaaataaggaaaagaatgtttgtttacataacgactgttttctgctgcatacttttgatgtgtgtggcagataaattgagtaaaagggcaagggttttaccttttgtcattacttttttgattttattcacagtatctggatttcgctatggagttggaacagattatttctttacatacgttccaacttataaacagatatataacggcacccctccgccaatggagcccatatttaaatggcttaacaagctgtgtattgattttgcaggtagttggtatcagtctatttttattgttacaagctttatattcataggtttaatatatattactatatacaatatgccatgttcagaaactctattgactgtttcttttttgtgtggtgggtatttcttatattcattgaacgtagttcgccagacaatagctactgcattattctgttgcgcgttattgtttgtgaaaagaaatatggatggtaaaaatcagttgcagagtctttttatggctttttccttagttgcgatagcggtaggttttcattattccgctctaatttattttgctgtcattcctctcctttatttaaagcttgacaaaaaaatatatttgtccctttttgcttttttggcttttcttgtacctacctttgttgcagttattggtatcttgctcaaagggacaaagtatgggaactacatatccggctactatccggatcctagtaaagcattttcgttatcgcctttattgtttgtaggtttcttctttgtctatttgtttacgaaatctaaagagggtgatcattggtttacggtttttagaaatttgcatttcgtgggatccatagctattatgattggtctgtctataccactaggtcagagaatttctgcattattctatttgcttaattttcttagtgtaccgtactatcttgaatactatattcaagaaaaaaataaaatctttataaagatattatatttctttttttgtatattcctattcctgcacacgttatcagttaatggaaatggcattctaccatataattccgctatataatattagttaacgtagtcgttagttacgatgcttttaaattaagaaacagggaacttagttgcgatagaggattttgccataatgttttttctaaataaaacttgaatgatgatagattgattatttaaagaagagaaagtaaatgagaggatcatgtcatggcgcaatcctctagactgactgcacttaattcgctacgaggcttcggcatcctactggttgtgttggggcatacatcgcaattcgctggactggtacattggattttctcgttccatatgccgttgttcttcatcatctcaggcatgttgttccacgaaagacaattcttcgactcatttaagaagaagattgcaagacttctcataccgtatctgttcttcggaatagcgactttcgtgtactgggcccttatcgaacgacgtctcaggcgaagcaatggatccatgaatgcatttggcgaaagttcttcttgcccgtgccggaaccagtaattatccgcagaatgctgtgctttggttcctgccctgtctgtttgtcacggagatgttgttccttggaacctttaccctcgtcaaatcaaagagagcgatccggcatgattgggctgttgccgcgacgcttgccacggtcagctttctctcaatcatggtcatgcattcctttggtctgccgattgattggctccgccttccttgggctcttgatatcttgcccttctccatgctgttctattgcattggctacttgttgagtcgttttctcatgccatgcatgcagaaatccaggccgtaggcatcgttgcatgttgtctatgctgtcatcggtatggcaggacttggcctgctgtgggtattcgatgagttgaccggactaagcgtcaacctcaatggtgcaagtaccagcaatccattttggatgctatgtgcagcattgcttggttttatatcgtcgctcatgctttgcgttgctatcgactgccggttgctgcagttccttggcagggcgtcgcttaccatcatgtgcgtgcatgaaccggtgaaacgagtgctgatttttgttatggcgaaaattctcgggatgaatacagatgcattgcgagcgaatcttgtatatgcgatgctggtgactgttgtcactgtagctatctgcgttgctgttcatctcattatggacaggtttgctcccatgttgatcggcagttcccgtcacaatctggcttcgcaaggcgaggcaagggcatgatgggaaaacatttgcggttggcatcatagttgcgctggaacgtcgctttgtttttgtaatgcctgtaagaagtcggcatctcgatttcgctttgcccgttgattgcattcatccgcaatggtggtgtcaatggtgacagatgatttgccgcactgacaccactagcaagctcagctaagtgttcactcttcctgcagatgtttgatttgcttttcgattccgtcccaaaccagttcgaaccggcggccacggttgcggtttacggtcaccgcaaacagtccttgacgcatgaagtcaatcagagtgcaggcactaaatagatcgtcaacaggatgccgaggatttgcagaatggcgaaaggctgctgataaaggttctccagcacgaacaggtgcttccaaagcaatgttctcgtggcgggataatcggtgatcaggtaaaccgcgaatgcggaccgggctatgcggttgatgatccggctgcggaaggaaagccggtcgaacagtagaaacatgtcgaagcccaccatgatgacgggcagcttgaacgatctggtgatgaaaatgcccttatcgattccgaacaacgataacataacggaagcgcatgtgtacaagaggaagaatcccagtccggttccggtcatcagccaagtctgtttgagcgtgaacggcttcatgtaccacttgtacgcggagatgaggatgaataggtagatgaagccgaacacgctatcgttcactccaaaagttccgggaatgaagcttgtcagtccccagatcgccagtaccgttatggcaagcgcgtaatgcatgtgttcgccgagcgcgcgtagccccttggaaaggaacggcagcagggcgaggaaggtggcgtatgcggtaacgcaccaccataatcccataatggtcggcgcgacgctacgaacgatcgttttcataccgaagtcagcacggtcgaaaaccagaaagaatgccatgagagcaaggctccagaacagcacttcgcgttccaaaatccatatgcgcttgaggttcgatttgatggtctgttccttgtcgaggaagaaccacgcggagatggtgaagaagatgacgacgcccactttgccatcgccctgcatgacgagctggaagaagatcctctcaggccccagcggaagattcttgacgtcatagccgttgtggatgacgaaatggtgggcgaggaccatgaacattgcgacgatgcgcaatagttctatgctggaattacgccccccaatttgaaattcgggtcggcgggacggccttatgggaggccgtggtctttgagcctataatcatctctccttcgttttttcttctctttccaacatccccctcataggggattctatccattcggaaagaccgagttgcaaaaccggcctataacccccgacagaaccgcaggccgcgggcgacttctggcgttcagacagcaaagatgatgcgccaacagactcgaaatggcctgcacttaccgcgcacatgcccttacctgttcctcaagcatttccaaagtattgacggaagccataatccgctctttgctcatgttctcgtaatacggctcggcatgaaccacgccattaagtaatttcatcgacagattcagcctgttaaccaagtccggatcaagaaacttgccgcacaaagcaatgttgccactgcacttgttttcaatcccctcattgccatagtaatgggcaaccagcgcttccatacctttctccacggcgagacgaagatgagtcgccgcctcaagatattcgccagactcgattctcgatacagcacgaatcctttgctgcttcataaatcggctctcgtcgagatagaacacccgcatatgccccgccatgtccagctcagcctggttaaaagagccggaaacagaaacagatgtgtcgctggactttttcagcttcgtcggagcgtatgccccagaaggggcggaacggcgaatcaagaaagcgtcgtcacgctcgtccgcacatgctgcgctgacgggaatctcatggcttccagtattttcaagctcgtcctgtagattgtcgtcgactttctttcgaacggtgctgcataccaaatcgataaaaacgataccgccagcaatcagaagaatacttttctcgaaccgtagcgcattcacattgatgttcattatcgtcgctccttaactgtttgaagttccttattttcatgccggcatgaaacatacgatacctaaaataaaccacccttgcaaaagcataaaatgctctaagtcagaagaaattaatagaatatatcccatgaatggcataatacttgacgcacaagagcgatggaacaagaaccttagaagtacgcgcaagaatgaaaaactcagccaagagaatcttgcggcgctgatgcgcgaacaagggtttacgacctgtactcagaagtcgatatccagatgggagcaggtggggcggaaaccaggctacgcattcccttcgtacgacaaaatggtcggacttgcaaaatgcctccaagttgacgtcccctacctaaccggcgacatgggcgggcggacttatgacgaacaatacatcgcaaactccatcggaacagatcccggcgttgtagcactcatcaaggaattggaacagtatgcctctgaaaaaatagattacgaagatgatggggagccggaaaacatcactctgtatcacaacgcggatgagctagcgcttttcattctggacttcgtcggaagtgaattcatttccaaatacagagacttcgtcgccgcatggatgaacatcacgccgcaagacgatacctcgaaagcaaaaaacgaagaagcacgctacaggaaggatctcaaggtggcgaaattcgagctcgtggattccttccaggcagcgttgtgccggcaatatcccgatccggattccgacgcatttctcaccgaaaaaggcctggaatgcaaacgcaacgaggatttgcaacgccagcaacacaaggagagattacaaaagaaaatatggaagaaattgcttgagcaaggagggaccgattccgaccaagacaagatgaggcaaatctcttcagcgttgcagccacttgtagatgcctcggcaaaagtatcgaactatcgagaggaacggatcgaagcactcagacttcgcatcgcagcacgcgctcgagctgctcaaggtctttcctgatagatagaacccgtttaaggggattttgtggagacgtcgtaggaaagacgaccatgagttcacgaaccaaagcctcccacaaggccggcaagccaaccaggattcaacatgggaaaggacacgaacttccagttcttcatttttgatgattggaagattccgtccctgcttatcggattcgggctttttgaactgttcgcacacaaggaattccacagccgttgcgttaactgtttggccggatccgctttcggcgtttacctgattcgctaccatccggcggtcaaggctcttttggatggattgtctttcgctcgacaagctgtacctgcccgcgcatccgctcgtggccatgacactatgcgtgctggccatcttcgcctgctgcctggcattggacctcgtacgccaaggcctgttcgctgtgacagtcgaccgcaaccgcggccaccggttcgaactggtctggaacaaagccacggaacgcttatgcatgcgaactccaatcaaagcacaaaggccgtctttccaagaagaaaaacgacctttgcgaactggacgccgcccagctttatcacaaaggatcagtttatacgaaaaatggctgtttttcaacttcggcgtgtttcacatagtaagcgtccaaacagttccgcactgcccaatctcactccacattgatgaaaaactctttgctccgtgcaatacatctcccatcgcacacagccgaaacactcataactagatcatcgtagggagcgctttcctgcggaacaatgtcaatgtcaagattcgaacgcgacttgtgcggccaaccatagtccgtccacacaagtcgcgttccatgtctgcacaacccgagaaaagggcggaaaacgctagttacgcagacgtgacgaccgcagacgggccgttgcgtatgcgcagattgcggaagcgatcaccagcagcagcgagatgatggcgagcgcctgcactgcggatccggagcgaggcatttccggcttctctggcttttctggattgctgggtttgccaggttcttctggctcttctggctcggcgacggctttgatggttaccgccacttgtgcgcttatgccatcgtggtcggaagtacgaagctgtgcgcccgctcccctacttgcgtttgcatccgtaaattcttcatccgacgtgttgcgcacagcggtgatggtgatgttctggctcacggcttcgaaggctttcctctttccaaccgcctgcattgcgcgatcgatctgatcgttcaacgcctgcaactggtcactatccaccacaagacgatagtcggcgatgccgttcagttgtgtttccgtcaactttagtaggtcgtcggcgctcaactgttggagtccgtccactgggtccaattccaccgaagcctgtttgctggagatcgccagaccgccgatatggaacatttcgtcgcccgtaccgtcaccgctagtgccgtctggaatcagcccaagcgagtcagccaagtatggcgcaagattcgacgagtcggagaacgagccgctcaacaaggcgagcgtgttcagtccagctggaatcataccccggtattcgccgccgcgaacggtcacatagccaagatttttagcgtcatccagcaggttgaatagcgtcggcgcgatgaacgttccatccgaaaaactgccttgcgcggaagtcccatccgtttcggcaaaccgcatcagcgttgcgtccgaggtgaacgtgccgctctccacgcgcagtgtgccacggcaatcgaccgcaggctgcgttccgcccgcaattgttcccggtccagcaatggtgagctgcatgttcgcaggcacagtgatcgcagcggatccagcggcttgcagcgcatgcccgttcagatcaaacgttacgtttcgcacgcctttcggaggcgcaatcgtaacgctttccgtcacatcagccagcaatgtaaccgtagtgttcttcaatgatgctcggctgatcgcctcctgcacgctcgcgtaggttgcgttgcccacttgcgcgaccgcctgtgattcgacggcaacggcaaccgcacccgtagagaacagcagcgttccaaacagcgttacgagcgcgaaaacagcggtcagcactactgaaaccaaatacttgccttgtgtttgcgggcgcatattcgcccgcttctcatgactacgcatgattatttccttttataggttctgttgcatatttcaatccgcaccgaagtgcgtgggaccaccctcagctttgagggataacgttacagaaatcatggcgccacgttgcattaattatcacatattgcgcagaagaaagcaaattacctatttttgaaaatccaaatctcatgtgagatatatcagaatacaatccttatctatagtggatataatcacataaattgaatctgtttcacatgagtatcacaatattccccataaaaataaaaccatcattataactacaaaaatatgcatatgatgaataactatttcctatcaaaaaaacaagtgagcccgcagtcaaacaaacccttactgtaaacaacgctttaccgtctacgcaagtcgggaaaacaaaagagcgctccgggagggagcgctctaacttgcgtaagcgatcgtacgaaagttaccgagaaatttagtaggatccggtaccgcggaaaactacgagcacggtttttgcgagaatcgcaagatcgcctgcaatggaccaattttcgatataggaaacgtccagatattcgctctgctcctgcgaaagatccgaacggccagaaacctgccacggaccggtaataccaggcttaaccagcagtcgcgcggaataaagggaaccatagcgggcaacctcttccggcaaagccgggcgaggaccaaccaaagacatgtcgcccttcaaaacgttgaagaactgtgggaattcatccaacgaagtcttacgaataaaacgaccaaccttcgtaattctcggatcatccttcattttgaagatgaaacgatcggtctgtccattttcttcggcaagtttcttcttcaattcttccgcattggtaaccatggaacggaatttatacatggtaaacggcttgccatgcaaaccgatacgcttctgcgagaagaaaaccggaccaccgtcatcaagcttgatggcgatcgccgtacccaacatcagcggtgaggaaatcagcagcgcgaaagccgacccaacgatatccagcaggcgtttaatcacgtacgtcgtattcgtatactgcggcaaacttgccagcaatacaggctgttcggccgtattacgcaagtacaggcgatgaccgctcacatctgccagagacacggccaacgcaagctccatgccaagggattcgatcgcaagcgaaatgccatgcagcatttcgaaatcacgggaaagcacgtcggcaacgtacacttcctgtgcacccaagctttcgcacgtacgcgggaaagcggcattgaacggaatcaccttcagtttgtcggcaccttcaatggaaggatcaggctcgaacgacgtgaccacataagcgcctttctcattactgtcaacttcgatcggacacacggcaatcggcgaataaccccaattggagtagtcccgcatggtacgcaacgcacgattgataccgtcggaagagccgagcaccacggtcttatacttgcaggcacccttctgacggctgcgatgctgccactgacgcatctgccaacgggcgatgacttctaggaagaatgcaatgatcggagcgacgataagcgcggttcgtggcaaggaaagattgaaaataaaagcaagcgagcagtaagtaatgatggtgagcagcgacgcgttgatgattttcgcatacaactcgtagccttccgccatcacatgacgatggtacgttccagcaaaagtgaggctcaacacccagatgagactgaagcagatgaggaacagccagaacggcatggccccattgatggcattatatgcggtatcattggcccaaagactgatggacagcgaaatcagcatgaccgcaagatcgaccatcaccaggcaaatgacaaaaaaataacgccatgcaggcacaacctgactccgcctgcccttgcgcctctcatcttcaccaacggaaaatggcgtgttcgaaaacgtcatcggctcaaactgaggcctgtcgccttgcgatcgattttgctgctgcttttgaccctgatggcgtgattcggaagaaacaatatgaatttcctgggttctcaccacttgatctaccccatgttcagagtcgcagaaatcgctctgcatgacttctccctctactaaccgcatcacactcaccccccgcaaagaagggggttccctctatgaagagatactatcatagaccctatgaaaacagtaggatcctaacttgcttttgcggttgaattactattggaaacacttgcttttgacgagatacgacgaaacgcgagggcaagaacggatgaaaagttgacgtccgttccgtgaacgtgggattacatgcgaatatacccgcatattccccccgcactcccctgttacaatatggactgtttagccgtttgctcgacggcttgcccgtttggtggccgcctgtttggccacttagactgcctacggaactgtctagcggccctcaatcagcggggtttgacgaagggtgagcggctcacccgtatccggagcggactgcacatgcacggtgatctcataggattcgccgggctgcaacgtaacatcgcccacgcccacggtcaggccattatgcaaagtcacacccttgtaatcatcggcattctggaattcccaatccaccaaacgaccgttcgcaggcgcgtaaatgaacaatgccgtcttgatctggcccttcggaacgatatttccgccaccagtcacatattccgcttcggaagccgcttcctccgccgtcatggtgttctgcaacttgatatgcaccgtatactggttcgcgccgtttcgcgcgaccttctggaattcagtggtcacttcgcgatgcaaataccagtccattttcgactcggtttcgtcggaaatatacacgccgacctgcggttttgcaccttccgtaatcaatttgccggaaatagcggaatcggcaatcagattctgctcatcctcatgcgcgctccacaccatcacatgtccctgctcaacagacgtgaaaagcgccttgacatacgatttgaaattgcccgcattctgcatgatatggtcgaacgcggcctgcgcggcgaccgcgaaatactcgtccgtctcctgcggagccatgcgcgcatacacgtcatgcagcaacgtttgggcagtattcgcaccatccaacgtcgaaccgtcaggcatggcaacgccaccggtcaccgccagcatgttctgcaggaacagcggatcaatggcgatcacaccatcaaccgcaacgccatactggcgattccacatggcgctcacaatctcgccggtacgcggaaaatcaggcgtgaaattcacgtcgcgaatatccttgccaagcttgtcggtaaacagcaaacgttcctcggcagtcaaatccacaaccggctcgtcggcattctgaatttccgaatcggaaacgaacggctgcaagctcacatgaccaccctgcaccgtgaccaggccgagcgatcccgtaaggccgccggacgggcgagcctccgcattcgtttgcgcaagaatcaaataattgcgcggagcatcattcgcatggctttccgtacccaacatgcttggcaacacctgcacgatggaattcaaggaatgcaccatgctgtcaagtttttcgcaatacgtttccgcgattttcagggcgtccgcgatctgcgcgatatgcggggttttcacggctttcacggttttcacttcccgcgtggccttgtcgatcgtatcgtccgcgatttggagcggccgctgagacgcttccaatccggaaatttcaatcgtgccattttccacgtgaacattattcagatcaatattgtcggccgcctgcaataattgcggcagcgcctgcgacgaaatattctccatggcggccaccgtggtacgcacggcggaaatatcatcgcccacatacggtacggccgacgccaactgccagagcggcgaagacgtctgcttgtaagccttgctcacatgattggagaacgcgctgatctgttcctcacgcttggatttgtcggaaccgacgattgtctgctgcaggccttgcgcactcaacaccgcctgctgcaactcgtttttcgtctgcaacgccgaccatacgaacgcgccggcgaaaacggcgagggctgcgattactacaagcacgccgatcaggatcttgcgacgacgacgcttgcgcttgatctggcgaatatgctcggcactcatgcggcggcgaacgcggcgggaatgcggggaggctgagctggagctggcggtggcgtcggagtctgcgctggcggtgacgtcggtgccggattgcggttcctcctgacggtcccgttcaggatggacaccgaattcttcaggctggtcagacgcgccgttcatattccgtttcgctccctaattgtttgcaagcacttcggattcctcagtgtaatagtagggggagtcgacgcagcctacggagcaataacggggtaaacggaagtattaccgctcacaaatatctgaaacacgcatttaggatgatgccttcacaagagtgccactatatggacactttccggcatttggaatagttctgatacgttcatccgatagtctataggttacaaaacggcgcttaacaaaaagaggcaaaaaagggtgtcatgagcgaagaagcaatgcgagaagaagtggcgcaagctgtggaagtggccgcaaacaaggccgccgaagaggaaatcagcaaactgaccgaattcgaaagcgccatcgacaagacgctcgcctccggatatttgaacgatacgctcaccgtcaccgacgcagacggtgtagcgcaagtactgccggtgcttgattccgagccgatctcacacctagtggaaggcttggaagccgtaggcgggagcgccaatgtgttcgtgcacaccagcgcaggcgtggtggctctcagcgtagtggaatacaagcccaacgaagaggagtagccatcgcagcatgcacggtcaggcggcacgcctacggttgagggcgcgttgcacggtttcatgcgtggaaccggcaccctggccgcgcacgccgaagaacaccattagcaccatcacgaagcagattgccgcactgatacgaagcgcccactgaatgccgaacacgttggcagccgcatacacggcttttttgccaccgagcgcagtccagcgaagagacgtgaacgtctccatcaaaatcaccaacaccggagcgccaatcgcgcccgcaatctgacgaaccgtattcgtcaccgcggatccggcgctcacctcttccggttccaaacagttcagcgaccatgtggtgatcggcatcaatacgaaacccatgccgatctggcgcacaaactgccaaatcgatacccaccaaatccacgaggtcatggaaatcaaactcatcatgaccgtgccgaaacacaaagtaatcgtgccgaccaacgccaccgggcgtgcgccgaaacggtcaagcaccttaccgccgaaaaactgcgaaatgcactggccgagcgcgccgggaagcatcaccagaccgctaattgcagcggaatagccacggcaatcctgaatatacaggggcatgatcaccataatcgagctgaacgcgaaaaacgaaagcgcggccgttatcgtgccaacagtaaaactacgattcttcaacacgctcaaattcaacagcggcggctgcgcttcaggattttcgacctgcccgcgcgcgccatgaatctggcggaacacaaaccaaataattcccgcaacgccaatcaccattggcagccaaaccatcggatttgcaaacgaatacgattcaatattcgtaaagccgaacattaagccgccaaagccgaaaacagacagtccaacggagaaaaagtcagccttagcggttttatcgttctcgccgaaattatgcaatccaaaataggcaagaagcagcgagataacgccgataatggtcaacgtgaggaaaattgaacgccaaccgttcaaatccgtctgcacgccgccaagcgtcggaccgatcgccggagccacactcatcgccatgccaaccgtgcccattgcgaaaccgcggcgagacagcggatagatcgaaaacacggtgatctgcagcaccggccacatcacacccgtaccaaccgcctcaagcaaacgcccgatcagcaccatcaaaaatgttggaccaagccaggcgaataccgaaccgatcgtgaacacaaccatggaaacaagcacgatttcgcgcgtcgaaaaacgcctcgtaaggtatgccgtaagcggcaccatcacgcccatgaccagctgaaaaatcgacgtcagccactgaccggtcgtaacggaaataccaaaatcgctgacaatcgtcggcaacgcggcgcttagctgcaattgcgtgaaattaccgacgaacgtaataaatgtaagaatcgcaatggaaataaacgccgtgcgcgttaaatgaccgttctgatacgattcctcgcgaataagcgctcgggacatgttccgcttcgctgacatcaatcaccttctccacattcaaacgcacaaactatatgatagcccgtatgacagaggcatggatattcgcctgcggattcctgtttttgtcatttcggggtaacgctcccctatttagaggtatcatggcacacgaaagaggtaggcaagttttcgacgcaggcagcgtcgaggggggggggaggtggaggataatgacagtcagggccatgttccacatctgcatggagttgtggggtattttcatatgcctgatttgcgcatgcggaattttcattgcaaccccacacaaaaccagacgaactcgcatcaaaatactcatgcagatcgcctgcatgcttcttcttggaaccgacgcgctcagctggtattttcgcgtagatgcagacgaaaccgcatactatatggttcgcataagcaatttctcagtattctgcatcaactatattttcatgagtttcttcgcaacctatgtttggttgacagtgagcaaacatcagcatcgcaaaccagccgcattgcgtgctgtctacgcattatccgtaattggaattctcttacttatcatcacacaattcactggtcttttctactatttcgatgaccacaatctttaccatcgcggtaatttctatcttctttcgcaggcaattgcggtcttgggaatcgcattatgcctcttcatgttgatctcatatcgcaagaatcttgatcgcattattttcctttccatgatgtcgttcttcgtgctaccagtattggcgaccatctaccaagcactggcatacagtttttcattgcaatgtttggcgatcgtgatttccacacagattatgttcgtcatggacaccgtggaaatgaacatgcgattccactcgcaacaggccgcctacgaaaaagcacggtacgaagccgaacatgacggcatgaccggtttgctgaacaaggaagcgggatggaaacacatgcgcaaatatttcgaccgcatggattcgcacgacgaagcgatgctgatgttcgtcgacatcgacgatttcaaaaccatcaacgacacatacggacacacggtcggcgatttctggatccgcgaggtcgcatcccaacttcggcacatctaccggcaagatgacattatctgccgatatggcggtgacgaattcttggcgcttattcgcaacaccgccagcgaacaggtgcttgaaaccacgctgggcatgttcttccaacagttggcacgcacctcggaacagcacgggcaagacgtgcattgcagtgtgggcgtgtgccgcattgcagccacccgcatccgcagaaacacggatgaaggaaacggcgaagatattagaggcgaagtggatttcgacgaatgcgtcaaacaggccgacctggcgctgtacgaaaccaagcgatccaacaaaggaaaattcaccgtctacgattacccccccccccagccaaaatccgcaaatatctgcgcctaggagcggcctgaaagtgtgaggaagacgagaatcacattaagcgcaacaatcagcgaaacaactatcatattgatcgtgaatttcaccgggccatccacatagtcacccatcaatgaacgatcgtgtgtgtatttcatcagcggaatgatcgcgaacggaataccgatcgacagtaccacctgccctataatcagcgcttccgtcggattcttcgcaaaccacagtacaaccaatgccggcacaagcgtcaccacgcgacatgcccacatcggcgctttgatacgcaacagtccatgcatgatttcggcgccggcatacgtgccgaccgatgtggaactcaggctggaagccagcagtccgattgagaaaatcgtgccgatcaccggcccaagcacctgttcgatggattgttgcgcaccttcaatcgtatccgtaccggtcatgccatgcagcgaatttgctgcaagaatcaatagcgcaagattcaccgatcccgcaagcaataatgcccaaaacacgtctattttactgccgtgcaacagagttttcacacttggcttgggctgtcctggcgcataatgatcgttcaccaacgtggaatgcaggtaaatcgcatgcggcatcactgtggcacccagcatggaagtcgccatcaagaccgtttccgttccttggaaatgcggaacaaggccttgcataacttgcgctggatccggcggatcaataaaaagtcccgcaatgaaaccaaacgtgatcactagcagtaatccgattatcagtttttcgaaaatatgatgcgttgcacctttctggaatattaataatactgtcgaaatagtgccgattatgcatccaccgataaaaagcggtagtccaaataataatttcagtgcgattgcgccaccaattacttctgcaagatcagttgcgatggcaataacttccgcttgcatgaaaaacatgaatcggccgccgtcaccaagtcgtttccctaagatttccggaagactatttcctgtgacaatgccgagtttcgcggattgatattgaataagcacgctcatgcaattggcgagtaccagcacccacaccaacaaataaccgtaccgcgcgccggatgtgatattcgcagccacattgccaggatccacgtaagcgacggccgccacaaaagcaggcccaagcatacccacaagctcatgcccgtagcgggagcgtccgtgaattgtctgtgccatctgtcggcatctcatgtcattcgtttcactgacttcgttcctgccatctatgtcgtttgcaccgccaacgttgtccaaaccgttcatattactcacatcgtccgcacgattcatattcatcgtccctccatccgagcaacgttatagcgcgcgagtcggcacggttatgttacgcgcacacaatatcacctgtcagcatatgcgcacttcgcgcaaccgcgcgcgccggtctggtcgtgagacgcaatgcgaggcatgtgcaacgaaatatggccgaattgcagcgacctgcgactaagctggaacgctggagtaagtgaacgaacgcttacgagaatcgtcaagagaagacacggctttcgaaaggacaacgcatggcaaccttccacacccccatgatcacattgaacgacggtaatctgattccgcaaatcggcttgggcgtgctgcgcatcgacgatgagggcgttacccccgtagtggagagtgcgctggaagccggctaccgtcatatcgacggcgcggcggggtacaacaatgaggccggcgtggggcgcgcgctgaaaaatgcgggattcacggagggggaactacgcaagagcctgtgggtcacgacgaagctgcgtgattccgaacaggggtatgacagcgcacgcaaggcgttcgaccgccagcttggcttgctgcagctcgattatgtcgacatgtacatgctgcattggcccaccccgttcgactggcgttccagcgaaacgtggaaggcgttccaggaattccgcgcggaagggcgcgtgcgcacgctgggtgtgtgcaatttcctgcccgagcatctcgaccgcttgcatgaggagaccggcgaatatcctgccgtcaaccagattgagctgcatccgacctggcagcagcgcgaggtcgtggactattgcaaggcgcatggcattgccgtggaagcatattcgccgatggctcgcggtgctgatttgaacgccggaaatggtgcgattgagcgcattgcagcggagcatggggttacctctgcgcaggtgattctgcgttggcatatcgaaaatggcacgatcatcatcccgaagtcggtgcatgtggaacgacagaagcagaatctcgatctgttcggtttcgtacttactcctgaagagcatgccgcgattgacgagcttgacagcccaacgcgtgctggtcatgatccgatgacgttcacttacgcctgatattccccaattccgcgatttcagtatgttgcatgtattatttcaataatcatggcacgaaagaataatcgtaattcttataattatcggaatattgagcaagatgtacgtgatattcagcgggccggcaaacggttcaaaaaaagttggatcaatgctgacggtccgctggaacgcattctcattctgctggtcgtcgttgcggtaatcggcgtcactatcggcatacttctgccgaaagtcaatccgaccgtaggtgagattaccggcgaatacacggcagccggcaccgccgcagaaacgttggaaaaacttacggtcgacgacaatcccaacaaggccggatatgatcgcgacgcgttcggattccgagaaaccgacgacgatggcaatggttgcgacgtgcgtgaagacgtgctcgcccgcgatttgacggacgtgcaatataagaacggccgtagctgccaggttgcgtcgggcacgcttgacgatccgtataccggtcagaccatccaattcgtgcgtgggatgaaaacgtcttcggcggtgcagatcgaccatgtggtcgcgttggaaaatgcgtggcagtcgggcgcgaacacgtgggatcacgcgaagctgtaccaattcggcaacgacatgtacaatctgctggccgtggatgggccggcgaatcagcagaagggttccgcttcggccgcatactggctgccgacgaacagcgaataccgttgcgattatgtggctcggcagattggcgtgaaagacaagtacgggctgaccgtcaccacgcaggaaaaacgagcgatgctttccgtactgcacggctgccccgcgcaggaattgccggcaaactgacgctaattcccgtcggcacaagtcctgttctgcggctgtgcaagtccggaactggctgtgcagacggcaggtcagctacatgcgcgtggtggcgcgggcgatcacgtgcgactgggtggtgatgcaactcggctccagcacacgcgtgccgtcgatccggtcgagaatgcggctgaccgcagtcggcgcaatccagtcgagacaagaatccatggtggtcagcggaggctggaaatatgcggcttcttcaatattgtcgaagccgatcacctgcatctgttcaggcacggaaatgccgttcgcagccaaagtgaacagcgcacccaacgcaagctggtcattgaacgccacaataccgtcgaatggaatcccggaatcaataagctgctgcgtaatgcgagcgccggaaccaatcgtccaatcctgcccagtgctcattaccagtcgggaatcgaatgccgctccccgcgcggcgcacgcttcgagcacgccgcgaagtcgcagttgcgcattgccttccactgcgtcacgcacggaatcgatatgctccggttcggttcgcgatccgaccaccgcgagccgggttgcgccatggtcgaacaggtattcggctgcgagtcgggcttcctgaatatcgtcgggggtaacgtggtcggctttgccgtgtgtggaacgcgcgcccacgcatacgagcggatagtccacgtccaagtccgccgcttcaaggttttcgacttcggagatcgacaggatcatgccgtccgagacggtggtgttgaagttgcgcaggagtgattgcgctccttgtgcggatccttcggcgtaggtggtgacgtatacggagtagccgtagccgcgggccgcgtcgattacgcggttggcgagctccgacaggtatggggcggtcaatgttggtacggcgagtgtgatgaatccggttttgccgcggttgagattgcgcgcggatacgttcacgcggtatccgagtcggtcgatgacttcctggactttttctcgcgtggagtcggtcatacggccggaatggttgatcacgttggatgcggttttgagtgaaacgcctgcctcttcggccacgtctcgtagggtgacgcgttttttgtccggcttcggctccggctttgactcgcccatgttcgtctccgtgattgttgaatatgccggtaaaaagtttaccagttatggcaagcccgccattcttgagtttcagaatggcgggctcaggttgtgtgaggttgttgtgttacgcaatcaattgcgcgaaattgcgcggaattatgcgcgctttacgacgagtacgccgttgcgatgcacggtgtagctgcccgtctgttcctctgcttccgcttggaacaggtagattggttcgccttcgatgccctgcaatgcgatttctttcttgccgcgcggcagatagaaatcgaaggttgcgtcggcggacttgcgcacggtgtgcagtacgtcggaatcggccggattggcgacatttgcggaatcttccacgatattgccgcgcacgaattccgtaagatcggcgacgttgagatcgcagccgacgaagtatgtttcgccggaaccgtacggattgcgggtgattgcggctgtgccgtcgagttcccattcgtcggcttcttcaccttcgtaggtggccaatacctgcgcacgttcgccgtcgacgttcacgtcgttctgccacaggcgggtgaccgcaccggagctcaaacgaatttcggacggttcgccttcggcttccgcgccgagaatgttgaattcctcgccgcgaatacccagcatttcgcgcagcaggccgtctccggctcccgggtatccgccgagccaggtgtggaagttttcgtcgatcagtccggttgcgtaaccgatgaccacacggccgccggcagctgcgaaatcggccaaacgctgcgtatcttcggcgctgagcatgatcacggtcggcagtacgacggtcttgtatgcgctccaatcgtatttcagcggcacaatgtcggcacgggtgccggcgttgaggaacgcacgataccagtcgcgcacgtcatgccaatggttgagcttcatgctcggcagggtttcggagcgtgtggcccattcggattccgcgctgaacaggatcgccgtatcggactgttccagttcggtgccctgcacgccagcgtcgccgagggttttcagcgctgcgcccagttcgcacacttggcggaacagtttggtgtcttcgcccgcgtggggcacgagtgcggagtggaaggattcggctccgaatgcggaggcacgccactggaagaagttgatggcgtcggcacccatggccacatgcgcaatggagtcacgcacggtttcgcccttgcgcttgcgtgcgttgagcggcttccactgcacggccgaagtggaatgttccatcacataccacggcttgccgagcgcgagggaatccatcaaagcgtcggagcagaacagttcgtcgatatgcgattcgccctcatggaagtaatggtcgttcgacacgaaatcgacttcctcggcccagtcggcgtagtccatgcagcactggtcggtggagaccatgaagttcgtggtgaacggcttgtcggggcagatttcggcgatggcgtcgcgttcggccttgtagaagtcgagcagcatatcgttgccgaaacgctcgaaatcaagcttttgaccggggttcaccatggagtcggcgcccatgaaacgcgggatgagcacttcgtggaaaccgttcatttcctgaccccagaaggtggtgccccacgccttgttgaggttttcgatggtgccgtatttgcgttcgcaccacaggcggaaggcgttgagcgcgttgtcggagtaatcgtaacggttgttccagccgtattcgttgcccatatgccatgcggtgacgtacgggttggtgccgtagcgttcggccagtttgcggcacagggtgagcgcgtattccttgaacaccgggcttgtcgggctccaggattggcgcgatcccgcgttgacgggatggccgaatttgtcttgcggcagcacttccgggtgcttttcgtacagccacagcggcgcggtggcggttgcggaggccagatcgaccgcgatgccggctttgccgagcttgtcgatgatgcggtcaagccagccgaaatcccaacggttttcttccggctgaatgcgatcccagctgaaaatggccacggccacggtattgacaccggcctgtttcatgaggcggacgtcttcgtcccacacgtcttccgaccactggtcgggattgtaatcaccgccgtatgcgatgcctttgccgttgtcggtcagcagttccggccatttgaacgtgcgatgcatggattactcctttgtgtgcgtatggcatccgctataacgccgaggatgccagctcgacagcttcccttcgaaagctctcgtaaaatctttttataaaatctagtatatatatttactaagatatttgagatggtcccggggatgtccacgatgacacccccgaggtcttatttttgttcttttcggacgattgccgaaaaatcggtatgcgctttaccgaaatttcagcatgcgaccgttgcgatcattccttgacggcgcctgcggcaaggccggactgccagtacttctgcaggcacaggaacgcgatgaccaacgggacgatcgtgatcaacgaacccgtgaccaccaggttctggatcgcctggccgccagcggtgctcgcctggtccttccactggttcagaccgatcgtcagcggataccagttcgaatccttcagcatgatcaacggcaggaagtagttgttccacgtcgccacgatcgtgaacagggccgtcgtcacgatccccggggcgagcagcggcagggatacctggaagaacgtgcggaactcgccggcgccgtccacgcgggcggcttcgagcagctcggtcggcacggcctggtcggagaagatccacatcaggtacaggccgaacgtcgacaccaggctcgggatgatcatggcccacggggtgttcgtcaggttcagcttggcgaacagcaggaactgcggcacggccagggcgatgcccggcaccgagatggcgccgatgatcaccgcgaacacggccttgcgtcccgggaaacggaacttcgccaggccgtacccgcccatgatggcgagcagggtcgcgccgccggcgcccacgaccacgtacaggatcgtgttcaggaaccagcgtccgaagatgccgtcctggtaggtgaacacggtcttgatgttgtcccacaaagcgaacgtgcggccgaagcccagaccgaacgtggacgtgaagtccgcctgcgtcttcgtggcgttgatcagcaggtacacgaacgggaacaggcagtacaccgcgaacagcgcgcacacgatggtcagcagcgtgctcctgcgcgggttcgccacgttcgcgaagccggacttcgcagccctcttgcgctcggccttctcgtcgcgcgcgaccctcttgaggcgttccttctcggtctttttcgcggccttctcctgggctttgagctcctgagcggtgagcctctgctccgtgcccgcggcgattgttgcgtcactcattttcgatgctccttagcgtttcttcccctatatgcggatggttcgcgccaccgggcgttacttcatctgctccttcatgctgttgagctgcaccgcgtacgcgatcgccatcgtgatcacggccatcgtgatcgccagggcggcggcgtagttcgactggttgcccgcgaagctcaggttgtacgcgtacatgttcggcgtgtagtacgtggtgatcgcgttgcccggcaccatgttctgcaggatgctcggctcgttgaacagctggaacgagccgatgatcgagaagatcaccgtgatcgcgagcgagcccttcagttccggcagcttgatggacttgacgatctgccattcgcccgcgccgtcgatcgaggcggcctcgtacagcgaatgcgggatcgtggacagcgagctgtagaagatcagcatgttgtagcccgtgaactcccacgtcacgatgttgccgatcgaagcgagcagcacgcttgggctcagcacgtcgaggttcgtgcccagccagtcgttcagggagccgaccagaccgtacttcgcgccgtacatgaagccccacaccaaagtcgacaccacggccggcaccgcgtacggcaggaacgtggagatgcggaagaacttcgcgccgtgcagcttcatggaatccaacgccagggccatcgccgccgacaggaacagcatgattggcacctgcacgcaggtgaacagcgcgaccctgccgaccgagctccagaactgctggtcgtggaacagacgaatgtagttgctgattcccacgaacttcgtgccgccgatcatctgcttctggaagaagctgatgtagatcgcgtacagaatcgggatcacgaacacgaacacgaacaccaacgcgaacggccacatgaacttccaaccacgccaatccgcacggtgacggttgacgcgaacctggtccgcaggcgtatgcagcgcatccgccgcgactgctgcttgctgagacatgctttcttctttctgtatgctttttgctctattgatcgcacaaccatgtgcaattgttaatccgcaaaatcttttattgtttgaattacaggattgctatttttttgaaatctttttctattgtaagatttcgtttttaaaattatttttacgaagtgaggcaggcgggtcacgtcagacgattcccacctgccgtcgatcttcatggttgcgatggtgcgttgcgtatgtcggatcgcattatcgcgtttttcgttgtgccgcacggcagcggctgggcgccgtcagtccttgctggtgacggtgtagccctgctggttgccgtgatcggtgagcgccttgctgtagttgacgaaggcttcctccagagtgatgtcctcgctgtaggccttggagatctgatcgccgaaggtggactgcgcgtacgggttgtacggcaggtactggaaggcggagaccttgcgctgggcggcttcggagagaatctcgttcacgttctggccgccgaagtagtcgttgaccttcttgttggcttcagtgttcggatcggtgaaggagtcggaggagaggatcttcttcaggctcgggaaggtgccggtgtcggccatggtctgggcgccgtcgccgtgggtcaagtattcgacgaacttgtaggccgcggcctgctgcttggactgggagacgaccgcgagtgcggagccaccgtcttcagcggagacctcgtcaccttcgttccactgcgggagctgggccacgcgccagttgccggcctggtcaggagcgccgttcatgaggttaaccggcatccatgcgccgatggtgagagtggcgatgtcgccttcgttgagcgcacggttccagtcgtcggaccagttggcgatcttggtgtcgacgaggtcttcgtcgatgagcttctgctggaattcgatgtacttcttcatgccggaatccttggtcatgtcaatggtgatgttctcgccatcaaccttccacggctgcgcaccggcctgccatgcctgggcggtgaagggctggtattccatggaggagccggaattgttggtcatgtaggcgccgatggccttgaccttcttggctgcctcgtaataatcgtcccaagtcttgatctgggagccgtcgacgccggccttcttgagcacggcatcgttgtagaagaagacttccgggccggaatcaatcggcagcgcatacggcttgccatcatactgtagcttgctccacgggcctgcggagaagtcgtcttcgagcttgtcggcaccgtaggcggtgaggtcaacgaggtcgccggtaaccgcgaactgggtgacggtcgggtcttccagcatgaccacgtcgggggcacccttgcctgccgcgacggcgttgctcagtgcggtctgggtgtcggatgcggtgccggtgttgttgaatttgacggtgattccgggattggccttttcgaagtcggcgatcagggccttcatggtgttgccggtgtcccagccccagaaaacgagatccgccttgtctgcgtctccggcgttggccttggcgtcgttgccgccgtcgctgccaccgcaggccgcgaggctggcgagggttgccactgctgctaccgctgcgagagccttcttcatgttgcgcatgttcttttccctttctgccatccgcttcgcatgctgattgcatgtcggtcgcatatgtttcggaacatccgccgcggaatgcacatgccgtgctttccacttggtgatgtttgtatgttcgcgacctgccaaacaatacccccgtggtgatgtttggactggtaggatggctttgtttcctttctgatacaaccgtgtaccattagctccgatgatacacggttgtatcaaggtgtcaagcaaaccggttcgatagcccccctgcaactgttgtgcgctattgaagcgccaacgaaatcatcggcgtttcgcacaaacagaatgacatcgtttgcacaataatctgcgattgtccgcgcatctcaaccaaaaaatggatcgcaagaaagctacctcacaagagaaaacatataaagaacatataaaaaggaggtctgcgaatcgcaaacctcccaaaacaacgcatacgacgaagagacggactccgcaccgctcgatgagcctacaaactgaggaacagctcgtgaatgcgggtatcgtcggtcagttcggggtggaacgccgtagcgagaatcttgccctgacgcaaaccgaccacattgccgtcgaccgacgtttcgaccgtggcccgctcgccgacctcggcaacgaacggtccgcgaatgaacaccagagggaaatccttgagcaccaccgacgtatccgaagcctcggaagtcccctcctcaccagcagccgcggaaatcgcagaagagacagactcccccgacgcaaccaccacagcatccgcatcgtcggaagcgccgaaatcggcggacgcagcgaacgaaccaagctgacgtccatacgcattgcggcgcacgaccgcatccaacgcgccaaaatagacgttctcgtcgttatcgagacgacgagcgagcaaaatcatgcccgcgcaggtgccgaataccggctttccagcggcgatatgcgcggcgatcggatcgaacaagccggtcgaacgcagcaatttgccctgcgtggtgctttcgccgccaggcagaatcacgcggtcgatcgaatcgtcgaaatcctcggcggcacgcagcagtttccacggcgcaccaagccgatccagcatcgccgcatgctcggcgaacgcgccttgcaccgcaaggatgccggtcacgccatgctgcgcggaagccgcaccttcggcaacgtcagtcgattcttccttcgaaatgtattcaacggcaacaaccatcggatctccttacccaaaccatcgcgaatcatgcgaaacgggctgcgcgcggcgcatcgaacagacatgccgacagccgcgcacagcgcacagcgcacgaaatgacagcgcaatcactcgccgcgagcggccatgatggtttcgatctcgtcttcgttgatgccgaccatggcctcgccgaggttctcggaaaggcgtgcgagcaggtcggcgtcctgccaattggcggtggcctgcacgatggcggcggcacgcttggccgggtctccggacttgaagatgccggaaccgacgaacacaccttcggcacccagttccatcatgagcgcggcatcggccggagtggccacgccaccggcggcgaagttgacgaccggcagacgaccgttgtcgtgcacatacttggcgagatcgtacggcacggccagctgcttggcggcctcatacacctcgtcgtcgcgaagggagacgagctcgcggatctgcttgttcatggtgcgcatgtggcgcacggcctggatcacgtcgccggtgcccggctcgcccttggtgcggatcatggaagcgccctcggcgatacggcgcagcgcctcgcccaggttcttcgcgccgcacacgaacggcacgtcgaactggttcttgtcgatgtggtacacgtcgtcggcgggactcagcacttcggattcgtcgatgtagtcgatttcgatggcctgcagaatgcgggcttcggcaacatggccgatacgaacctttgccatgaccggaatggacacggcttcctgaatgcccttgatcatggccggatcgctcatgcgggaaacgccgccggcagcacgaatatcggccggaatacgctcgagagccatcaccgcgcatgcgcccgcgtcctgtgcgatcttcgcctgctccggggtggtgacgtccatgatcacgccacccttgagcatctgcgccagattcttgttcagttcgttcctgttgttggccatcgccagcctttcgtcgaatcgtattccaccctgctgcagagcggatatctcttgacacagatactaacgatttttcgttacaaaatcatgtgaactgaatatttgcacgtcttaaaaagttgcttttcttaaattctgactatcattttcatgattgtttcattttcttacgatttcgattctgccgacgattccgcaatttcattcgcttttcttgcctgatatgcgccattcgctttcgattcgcgcgcacggctcctttcgaccgcactttcgatgcacgctataagaaatacgaatgacgcatgattttcatacgaccacattgcggacgggggtgcagatggattcgcgtattgcgcactacatacgcagtatgcgatcagcgatgcgcatggtggaatcgcggtgcgacaccagcacgacggcgctcccccgctcggcaagatcattgatcgacccgagaatcaccgactcgttataggcgtcaagacggctcgtcggctcgtcgaacagcaccaaatcggcgtcgcgaaggaacatgcgggccaatccgatgcgttgcttctcaccctccgaaaggcggccacccagctcgccgacccgcgtatccaagccgttcggcagcgcatcgaccagttcgagcgcggacgccttggcgagggcttcgcgcaatacggaatcgggaatgtcgtgcgcgagatccgaatcggaggaatcagcggaatcaccaccagcattactgctggaattactacagaaattactgccagaattactgtcagaatccgaaaaatcggcgtcattgcaggcaatagcgagattttcgcgaatcgttccgtcgaacagatacgtctcctgccccatcatcgtctgcacgcgccgacgccatccggcgtcaacctgcggcaatggaacatccgacagcgaaatcgtgccggaatccggatcccagtagcgcatcagcagtttcaacatcgttgattttccacgcccggacgggccttgaataccgagaatgccctgccgtgaaacatcgagtgaaacatggtcgagcaccggttgcgaggcgatgccggcaccttgttcgccggaggattgcgcttccgcggggcgtgccggactcatgccagtcgcatgctccgaccgcccgtttggcgtgcgttcgacggaaatacgggcgccggatccatagccgaatgtgacatcgcgcattgtcatgccctgatattccgggcgttcgctcccctgctcgaccacagcgggagcctcatccatcaacgcgaacaggcggcgtgccgaagcaaacgtttgcgtcagattcgccggcaacgcactcaacgcaagcgtcggcccaaacgagctggcgagcagcacgaaagccgcaaccaacgctggggcgttcgatcccacggaacccatccacatcaggccttccgacatatcggcggcagtggaaaccgcagtgcacaacgtcatcgcaaggaaagccgcaatcgccgtgaacagcatcaccaataccgcgccaaatcctgcaaaatcgccatttttcacgctcagacgcacacgtttgacccacagcgagcgcgtgcgacgctgaatggacgcaagccgggcatcgccttggccgaagcggatgatttcgccgatgccacgcatatcgtcaagcatttcgtcatcgagggcggacgactccttgcgcagttccggaccgatgccgcgcaccgcggatgcaaaaagtttcggcagtatgacgccgataatgaggtgcgcgatgatgagcgtcgccgcgaggggcggactgagggtgagtagcgcgagcgcgtagacgacggtagtcacgatggcgatgacgaccgggctgatggtgtgtgcgaagaagatttccagcagttccacgtcggtggtgaccagtgcgatcaggtcgcctttgcctttgcctgcaagcttggcgggggcgagacggcgcagggccgcgaaggctttcgcacggaatagcgcaagcagacggaacgccacgttatggttcatgaactgttcggcgtaacgcatgccgccgcggatcaacgcgcatacggccatggctgcgagcgccgcgagaacgctgaggttccagaccggcgagccgactgcagcgaaggccgccgcgatgccgaacaccggcaggaaagtggcggcgagatggccgagcgtgccgcagacgcacgcgacgatcatgtacttgcgctgcggcccaacttccttcaacaggcgcgcaataaggcgagacgtgggtattgtcttcgcgtccgattctgccgaatcggacatccgaacgcccgttttcgcaccctgtgcgtccgtttctgcagaatcggacacttggagacccatttccgcacgctgcgtgactgattctgcagaatcggacgctttaagtgcgtgggatgcagaggtggaatgggttgcgttattgcgtagacctatgttttccacggtttgttgggcgtggaacagtttggcgtatgttccgttggcacgcatgagttccgcatgcgtgccttgttccgccacgcgcccgtgttcgaataccaccacatggtcggcgtcggctgcattcgccatgcggtgcgtcaccatgatcacggttttgccccgatccgcaagcgcccgaatggtttgcagaatcagggtttcgctttccacatcgacgctgctggtggcttcgtcgaaaatgtagacggcaggctcccgcagcaatgcgcgcgcaatggcgatgcgctgcttctgccctcccgacaggttgcttgcgccctgttcgatggccaggtcaagttcttgcgattgcgcacgcacgaaatcgctgatatgcgccgcttccagcgcttgccacagttcgctttcggtggcatccggcttggccatcagcagattgtcacgcaacgttcctgcaaaaaggtggctttgcgccgccactatggcgatttccctcgtaagggattcgatggaaagatcgttgatttggtaccgttgcgtcgagttgtttcctgtgtttccggattgcagccacatacatccttcatatccggaaagatttccggagagcagttcgacggcggtggatttgccggatccggacggaccgacgatggcggtcacctgcccgcgccgcgcagtgaaagagacgccatgcaatgcgacgaccgaaccatcatcatctttcgacatgcctgtttttccagcaccaaccacaccggactttcccccgatttgtccagtttttccagtttccatatccgccgtcacagccgtatccgcagccacactcacagccgccgcagcatccgtattcacgtccacatatcggaacgacacgtcatcaaagcacacgtccacaccgttatcagaagcgccgaattccggcatttcctgcatcccatgcgcaggaatcggcgtatcaagcaatgcgaaaatacgcttggtcgaagtcatgccgttcatcgcaacatggaagaacgaccccaattggcgcagcggaatgaagaaatccgcggaaagaagcactatcagcagcacgccggcaagcggcaatgcggcaccactcgcatactgccagatcgatacgcccacgccggccgcggcacccccgtatgcgacgacgtccatggcggtgagcgagcgcagctgaatttgcagaacattcatggtcattacgcggaattgttccgcttgctcgcccattttcttggcggcatgcgcatccgcgtcaaaagttttcagcgtttcaagaccttgtacattgtcaagaaacacagatcccatgtcggtgtattttccccaatattttttgaatactcgggctgcgcgcattgcgaccatgccaacaatcaatacaatcaaaggcgcgcatacaagcaatgtaacagccgtcggcatattaatcggcgcaactataaaaaataatgttaccggtgcgagaatcgcataaaacagttgcggtaggaataattcgaagaagctttggatttgttcgatgccttcaccggcagattgcaccacgtcggcagtgctgatatgttgcgaatatgatggtccgatcgcaagcattttattaaaaagctgttcacgtaacgcgagtttgacacgctcagccgcttccgcgccgaaataggccgctgcgcgcatcatcagaaaacgcagtaccgcacagaccacgatcgccagcacgcatccgacgtatgtttccgcactgaatccgccgtagccaaagccgatgaacaggcgggaaatcaggccactatcacccatggagaacatggggtcgaacgccgattccaccacggcaagcgccggcgaaagcatgaccaccaccgtcaccacgaacacgacgttggccagcagtccgacccattggcagagcactttcgccgcaaccaaccgccccacgccgggagcgagggaaaacagcctcttgtcaaacataaacaccttccgtccaatgagcgcactcgcgttgccagctcgcctacggcccaaagcgcaatcgccatgcatccaacaaacgaatcgcaacaggccaatacgggaaaaccggtgcgtggcaaaccgttttcagcctatccaaggcagctcgcaatcgtcaagggcgcattgcatacagcgaaccgtcgcaatcgaattgccataatcgacctcaaatcagcaacgttgaaaagagaaaggctggatgttcgccgttgagcaggcagccctctgacgcaaggggtaaattgcgtcactcgtgagtgtactcgataaaaaacgctcgcaccaccatttcttcgcatttcgctggttttacggtcctttcggggatatatgggaagcatggcgactcccccgcaaccgttacgtcaagcctttttttcgaacggatacagcgcgacaccaaacacttgatttttgacggaatagcaccatttgtcagttcatacaaagttgatgaaatatttcttgtcgcttctcacaatgcagacttacggccccgtaacttagaatgtgcaaggtgcgcaaggggtaggaaacgcggacacacggtttgtatcgctcccgcacgcatcacaagcagaaatacgcggaaacaacgcaaaaaccgcgagaaagagaacgcttcatgctcaccgagtacaccaccccgggcgaatccgttgaggtgcgcgacgacgaatccatctattccctgcttactggacgcatagcgcgcactggcgaagataccgtgatcgcggaacacaaaaccgcccccggccaatggacgaaggtcactaccggcgaattccacaatgccgtgctcgccgccgcaaaaggcctcatcgcattcggcatcaacaagggcgatgccgtcaccatcttctccaccacccgctacgagtggggcgtgctcgacttcgcactggccgccatcggcgcggtgaacgtgccgatctacgacactgattccgcggcgcaggccgagcgtatcctcaacgattcggatgtgaaactggccatcgccgacaatcgcgagcgcttcgaccgtctcgactccgtaatcgaccgctgcccgtctctcaagcacattctgatgctcgattccaacgccatgggcgcgttggaaggcttgggcgtcaccgtgtccgacgaggagctggaagcgcgcatcgattcggtgcatgcagacgatctggccaccatcgtgtacacgtccggttcgacgggagctccaaagggtgccgagctttcgcaccgcaatttcatatcgatcacgcgcgcaggcagtctggcgttgcatgagatcgttctcgaagatcatccgcgactgcttctcttcctgccgctcgcccactgtttcgcacggttcatccagtacgcgtcgattgcttccgacgacggcgtggttggttatctgccggacacaaagacgctgctgcccgatttgcgttccttcgaaccgacatatctgctgggcgtaccacgagtgttcgagaaggtgtataacgcggcctcccgcaaggccggcacgggttggaagggacgcctgttcctcaaggctgccgaagccgcacgcgattggtcgcgcatgcagcaggccggcgaacgcccgaccgccaagcagatcgcgcagcatctttcgtatgaggcttccgtataccgtaccgtgcgtagcgctctcggcccgcgcatccgctacgtggcatgcggtggtgctcctctggacgtgtctctggcgcatttcttcaacggtatcggcctgccgatgattcagggttacggtatgacggaaaccgctgcgccgttcgccgcgacccgcgtcaccgacaatgtgatcggcactgtcggccaaccggctccgggatcgtctgtgcgcatttccgatgatggcgaacttcaggtgaagggcccgaacgtgttcaggggctaccacaacctgcctgagaagacggcggaagcgttcaccgaggatgggtggctgaaaacgggtgatttggcgtcgattgacgacgagggacgtattacgatcaccggccgtaagaaggacatcatcatcaccgccggcggcaagaacgtttctccgattccgatggagcaggagattgtgaaatgtccgattgtggagcatgtggtagttgtcggcgacaatcgtccgttcatcggtgcgctgatcacgttggatccggaaggattggaggcttggctgccttccattggactgtctgccgatacgccgttggatcgcgtggctgcgaccgccgccgttcacgacgaaatccagaagtacgtcgacaaggcgaacgcgaccgtttcccgcgccgaatccgtacgtaagttcgtagtgctggatacccagttcacgcaggaaaacaagtgcctgaccccgtcgctgaaagtggtgcgtccggcagtgaaccgcgtgttcgcacaggtgatcgatcagcagctgtactccggcaagcgctgaatcgcataatacataaaagcgtggggtacgagagaacgtttgtattctctcgtaccccacgcttttgttctgtctgtacaactttcaaggaatgcaaacgagcgccggtgatcggaagcgatccgacccgccggcgctcatatggcagagattagtgatgaatccagaatggctaacgacactccatcagccattgtcagtaaagcgacaatcagtgacggttccgtcagtgcataacgcgtgcggtaacggtgcgacagaaggcgaggcacgagggtacgtcgagtcttctgctgtgccgttaacgctccgttatgttagtgacggttgttgaggcggtggtacatttcggagatctcaaggtcgcgctcgaattctgcggccttggtgttcgcgtcgatggtggcgagttcgacaccggcgatgcgggcgaagtcttcccaagcctcgcgaccgacggaggtggtcatgcaggtgtggtgggaggcgccggaacgcagccagcactcggcggaggtcttgaggtccggctgcggcttccacaggccacgggcgcacggcaactgcttgagctctccgagcggctcgaccacgtcgaccaggttcatggtcaggcggaaacgttcgcgcacgtcagacatggacacgacgacggcgtccttcttcggggcgacagtgaagaccaggcgcaccggatcggccttgccaccgatgccgagcgggtggatttccagcttcggcttggcgatggtgccgacggacggggagacttcgagcatgtgggagcccatgatcatctcgttgcccggggtgaagttgtaggagtagtcttccatgagggaagcgccaccttcgaggccgtagcccatcactgcgccgatgcgcacgagcactgcggtcttccagtcgccttcggcggagaagccgaagccgtactcggacgggaagcgctgcgggccaacgcccggcagctgcgggagagcacccaagtcttcgaagttgtcaacgccggcggtgcagccattggcgcgcatcatgttgaccatggcggcttcttccttggccgcgatgaacagggaatcgtacttggcgtcgagcagagccggatcaacgtcgtacttaaccttgtagtcttcgatgatgctcttgacctgatcgtccttgacggcttcgtaggctgcgacgagctcgttgacggcccaagtgttgatggatgcgccgaacacgcgctcggcttcggtcttgtcgccttcggtgacggccacgttgcgcatgttgtcgccccaacgcatgaccttcatgttgttggaagcatcccagccggcgcaggcgcgtgcccaggtgccgatttcttcggcaacggccggatcggtgtagtggccgaccacgatcttgcggttgatgcccagacgggtcaggatgtaaccgaactcacggtcgccgtgtgcggcctggttcaggttcatgaagtccatgtcgatggtttcccacgggatttcgaagtggtgctgcgtgttgagctgcagcagcggcttggtgagcacttcgaggccgcggatccacatcttggccggggagaaggtgtggcaccaggtgatcacgccgatgacgttcgggttggcggaggcttcgaccatgaaggccttgacgccgtcggaggacttcagggtcggcttaagcaccaccttgaccggaatcttgccggttgcgttgagcgcgtcgacgatttcgccggactgctcggccacctgacgcagcgcttcttcgccgtacagatcctgggatccgacgccgaaccagacttccttgccttcaaacgggttttccattgccatgtgattgttcctttacttcgttgtttatggagtttttaattatttattgcgattgcgaactcgcgcttcgcgttgttctgttgcgtagcgcgagttcgtacgattgtgaaattatgtaggattacggaatcgtaggattgcagctcagtgctggccgtagacgttggtgtaacgatcgttcagcttcgcgatatcctcatccgaaatcggaatgatctcacccaactgcctcgccgcccacatcgtatgagcgacctcctccgtcatcgccgcggccttcaccgccgactccgcgtccttgccgatggtgaacggaccatggttctgcatcagcaccgcaggagacttcggatactccctgagcgtctcgaccacgccctcgccgatcgcctcggaaccgatcagacggaacggacccaccggaacaggaccgccgaactcgtcgcccatcatcgtcagaccgcacggaatgttctgccccgtcgccgcccacgccgtcgcatacgtcgaatgcgtatgtaccacgccgtacacgtccggcatatgacggtagatgtacgcatgcgacgccgtatcggaggaaggagcctccgaaccgtccaccacgttgccgtccagatcgcacaccaccatgctcgacggcgtcaggtactcgtaacgcaggcccgacggcttgatcaccatcagatccgccgtatgcagacgctgcgacacgttgccagccgtccacaccaccaggttccacttgatcagctgctcgtgcaaggtcgccacgacctcgcgcacctgcttgacctcggcacgaacctcaggaccataatcagccaaagtagccataatcatttcctttcaaattgaaataagtttttaaaatatttatttacttggtttccagcggaatgctttcgattgcaacatgctcaatcggcagtcccttgcggaagcgatcgaagaattcctcgaatcctgcgacatcgccttcatccggattttccgtggtcgaagcggcatcggcgaacacacgagcgtcaaggaattcgtcgagcggctggtcggcgtgccacaggtagtcggctagcacggccatgccccatgcgccgccttcggcagcggtggacattaccttgatcggcgtatcgaatgcggctgcgagaatcttctgggcaaccttcggggtggtgaagatgccaccgtggccgacgagggagtcaacggcaacgccttcgtccttggtcatcacatccatgccgatcttcaccggggagaatgcgctgaacagctgggcgcgcatgaagttgccgaggctcatgcgggcttccggaccgcgcgcgaacagcgggcggccttcgggcagtcctgcgaggaattcgccggagcggaacgggtagttgatgagtccgccgcagttggagtcaacatcgtccgcgatggcggcgcggaacagcgtgccatacagggtgccggcgtcgaccggagtgccgattgcagctgcgaactgtccgaacagaccaacccatgcgttgaggtcggaggtgaagttgttggcgtggctcatgcctgcgagatcgcctgccggagtggtgacgaggtccacttccgggtgcaggcgttccagcttgcgttcgagtacaaccatggcgaagatggaggtgccggcggaaacgttgccggtgcgcacgcgtacggagttggtggccaccataccggtgccagcatcgccctccggcggagcgaatgtgattcccggctgcagcgtgcctgtcggatcgagcagcttggcgccctcttcggtcagcgtgcccgcaggagtgcctgcaaccagcggttccggcagcaggtcggcaagcttccacggctgggctgcgacttccggaatcgcattgaacttctcaatgaattcggtttcgtaggtgtgcgtggtagggtcgatcgggaacatgccggatgcgtcgccaacgccgagcaccttcttgccggtgagcttccagtgcacgtagccggcgagggtggtgaagaaatcgaccttgccgatgtgctcttcgttgttgagcacggcctggtacaggtgtgcgatggaccagcgttccggaatgttgtactggaacagttcggaaagcttctcgtgtgcttcggaagtgttggtgttctgccaggtgcggaacggcaccagcagttcgccatctttgccgaaggcgaggtagccgtgcatcatggcggagaagccgatgcgtcccacgcgggtgagcttttcgccgtaagcgttttcgacatcttcggcgagcgccgcgtatgcggtctgcagcccggtccagatttcttcctgcgaatagctccacaggccgtcttccaagtggctggcccagccgtagtcgccggctgcgatggtggtgtacgtgtcgtcgatgagcacggccttgattcgggtggagccgaattcgatgcccagactcgtcttgccagcgcggattttctcggcggtcagcgcgatgcgatcgtcaagtccctgctcttgcgccatagtttcaaactccttgcatccgagcgcctcacaaccacattgtcgacggaatgttagcgctcactgttaacgctcactattctaaacagaaagtggcgactatacaagttcgacgtgtcacgcaatcgtcaacgtactaccggcagatcgtcagccgattttcttgatataccggcattacgaaatccggcaatcgcagcacatgcggcaaaaagagatacgagaatcacaagaaatacaaaaatcgcaggaaatattcagcgacggctggcggtgcccaaagaagtgcggccgatcaccttcgcgggaatcaggccgacgccatgctgcgacgaggcgaacgaattctcatcgccctcccccagcaaaaacagcgtctcacgcatggcggcaacgccaagctgttcaaaatccgggcgaaccgtggacagcggcgggtacatgttgtccatggcgggcatgtcgtcgaaaccgaccaagctcacatcctgcggaatacgcatgccatgttcatgcagcgcacgagacacaccaaccgcctggctgtcgttcgcacacaccatgcacgtcggcagatttccgccggtacgaccgatgttttcgagaatatggttcatcttgccatacgcttcggtcgattcccaggtttcgcattgcacggtgacggaactcaccgcattggccgcacacagcttattccacgccatcaaacgcgtggcggcgtcacgccattccttcggacctgcgaaataaagcacggaacgatgcccatgctcgaccaccaaatgcatcacgtcggccatggccgaccattggtccactcccactacggatactcggcgacggtcggccggtttcatcaagcgcaaaccatcctgcacgctgatgctgccgtgcgtggaggtgacgatgacgcgcggctgcgtgatctgcgcacggcaggcggcggaaaacataacatccgtcggcgtgaggaaaatgaacgcgtccacgttcatctcatcgaacgttgagcacaattcgtcgaattccgcctgcgagcagagcgcctcgtgcaccatgctcaccgacatgaacagtccatgctgcctcgccatcgcctcaatcgaggaaatcgcggaaatcggaccataaaagcgttgcccgcccgcaaccaagccgatggtgcgggagcgatgcgaagcgagggcacgcgcggaattgctgggacggtatccaagcgcgtcgatggctttctgtactttttcgcgggtggcatcagacacgtcgggggaatgattgatgacgcgcgacaccgtttgatggctgacaccagccattttcgccacttcgaacatcgaggggcgtttgtttgccgcattgcgcttgcctgccatgctccgtcgccttccgcacactaccgttgttactttcgactattctacacgcaacttcggttagcgctaacagacgctatttttcagccatttgagcgagtcgcgcagcgaaattcggccagtcggtacgcatggcggtcaacagtttacgattggggacttcctcaatcggcacccattcgatttccatgctttcgtcgtcgttggccttcggctccacgcggtgccccggcttttcgaaagcgaacacggtggtgtaggcccacggtccgtggtcttcgcagtatgatccgaccacgtcgatatcttccggcgtgatgttggcttcctcgtacgattcgcgcagcgcgccctcgatcgggctttcaccgtcggcggtggcacctcctggaatgccccatgtgccaccttccgcgctccacaccgcgcgatgttgcatgacaacgtgcgtcacttcgccggtctgttcgcttcggcgggccaagagcacgccggacgcgccgttcgtgccccaatgcttgcggccgcaatcgcaatcaatccaaccatcacccggctgatgcacgttttccttgggaggaagcggcttcgcggcaccggttcgcgaatcgtgttcgacgttcggttcttgatcggctcgcgtcacattccacagatcggtccattccacgccgagctcggcggccaaacggcgcgccagcggaaggctcaggccgataatgccgtgcggatcgccttcgatggagtcgatgaatgctccgccgaagccctcaagcgtgaaggaaccagccacttccaacggttctccggtggcgatgtaccgttcgatatcggtgtcggaatattcgcagaagtgcagcgttgccctgctcgcgcctcgcgcgatacgcccggtggcgaagtcgatcaggcaatggcccgtccacaattcaccggtggcgccacgcatggcacgcagtcgttcccgagccacctcagcgctatgcggcttgccgtaacattcgccgtcaagcaggaacatggaatcgcagccaagaatcagcggaccgactttcgcacgggtcaggctcggcttgccatcaacgaaatcagcaatcgattcggtgatcgtaggaatggtgactcccgaaaaatcgcggatcttcacatcggaggcggactgcacttcgtccgcacgcaacgtaacacgatgatgttctaaagatgcggaatccccagtattttcagcattatccgaatgttcggaagattcggcaacggctttcagcggaaatccgaccacacgatcgccgtgcgccgccgcagcggtggcggcaacgttccgatacgcctgatgtacggcttcggctttggccgtagcgagaatcatcacccgctgttccacgctcagatcgcttacggcaacgcccatggcggccgcctcacgttcgagcgccgccggctcgtccacgttcgatacgcgaatcgtggggcaaatgcccgccgagaaaagcacgtcacggcgaggcttggatttggaagcgagaatcagcggaatggagttgttcatgcgcgttccacctgcacacccttggtgtcgacgcccaaatgcagcacacgccaatgaccggaagcgagctcttcggaagcaagctgtcccagctgttcgcgagcgtcgccatgatgcagcacgagcacgcatgggccagcgccggaaaccatggaagcaaaaccatgggaacgcagcttttcgatcaacgtccacgacggttccatcaaaggagcgcgatacggctgatgcagacgatcctgcgtggcggcgaacagcaacgcgttgacgtcctgacgctgaccagtcgccagcatcgcaggattcatggcggccggcagcaggctcacgcgagacacattgtgcacggcatccttgaacgccagctggcccggcagcgcctggcgtgccttttcggtggacagctcataatccggcacgaacacggcggcggtcagatcgtcggcaacgcgatagttgatggtatggaagcccttatgcagcggttcgccgcccggaatcggcacggaaccgacaccttcgggggtttccatgtcccaagacatggtgagcccgccgtacacggccggagccacgttgtccggatggccttcgatggccgcagcaagctcaaacacggcatcacggttgagttcgtcgtcctgcgcgaaggcggccgcggctgcgatgcccgccacaatggcctctgcggaagagcccatgcctcgtgcctgaggaatgttgttgtgagcctgaagaatgaagcccacacggcccagaccaaaggtctggcatgcgcggcggaacgtggaaaccaccaagtgggtttcgtcacgcgggagagtatcggcgccttcgccttcgatcatcacctgagccgcagtgttcaccggatcggcgctcagcgtgaattcaagttcgtcgtggtagtccagagcaagtccgaccgtatcaaagccagaaccaagattggcgctggtagccggaacacgcacacgcactttacgagtaactggagtcatatctcgtcgtccttcgtcacatcttctttacaaatgtagcaccgtatacccgaaagggtacaagagtcaaattcaagcccataatcagcgggcgattgagtaaacaatcggcaagcaattgcccaacacagcagccggaatatgaataaagagacggccgcccaatcgcaacgatttgagcagccgtctcataactgttagttgagcacgcggaggatggaaggctcgccaaccacgcagtcgagtgcgcacacgtctttcacggtttcacgcagggtaagctcgtcggtcatgtgcgtgacaaggcgcagctgctgcagttcgccgtcgtagcccggatccttcagcgtgggcttgagatcctggttcacaccattgatggacacgccatgctcggcgaacctggccgcaatggccgcaagtacgcccggattgtcgtgaatcacgaaacgcaccgcgaactcggccttggaagcctcgatcggagccttcttcaaatccttatacaacggaatggtcgggccagtgcagccctgtgcgatgtgacgcgcctcggtcaccacatcgccgaccactgcggaagcggtcggagcgccgccagcgccacgaccgtagaacatcagatcgtcagccgcttcggccttcacaaacaccgcgttaaaggaaccatgcacggaagccagcggatgctcgttggaaatcagcgccggatacacgcgggcagacacaccggcctcgccattctccaccacggccagcagcttgatgaccttgttttcggcggttgcggcagcaatatcgtcggcggtgatcttggtgatgccctcaacggacacatcatcgatggtcacgttggtgtggaagccgagcgtggccatgatggccgccttgttggccgcatcgtagccttcgatgtccccggtcggatccgcttcggcgtatcccttggcctgagcgtccttcagcacgtcgtcgaaatcaagacccttggtggtcatttcgtcgagaatgtagttcgtggtgccgttgacgatgccgagcatgctcgtcaccttgtctccgacgagggattcacgcagtggcttgaggaacggaatagcaccgcccacggaagcctcgaagtagatatcgacgcccttggcttcggcggcggcatagatttctggaccatacttggccaacagcgccttgttggcggtaaccacggaagcgccggattcgatggccgcaagcacgaacttgcgggccacgccggttccaccgatcagttcgaccacaatgtcagcattggtggccacgctcatggtgtcggtggtcaccacggacttgtcgatccacgggaacgggtcggtttccgacggatcaaggcaggcgacgccggtcagttcgatcggtcgtccgatgcgtgcggcgagctcatccttctgctccaccagcaggcgtgcggtctgagagccgaccgtgcccgcgcccaacaatccaacgcgaatcggcgcaacatcttcctgtaccaaggcatcctcccttgaatgtgaagtattggtgtaaccctgcctattgtacggtcccgatatgacgtaagaccgcgaaatcatacgaaaatggacggtttccgagctttgccccgaaaaccgcccatactgcatccacgctgcatccgtaatttgagacgaatcgccatgaacaatacgaaacacgagcgaaacgccacgaatcgctattcgctcacatcccaatccagcagatcatcgaccgtctgacggcgaatcatcacatgcgcgtcttgctcggatacggcaacaaccgcaggaatcagcgcctgattgtagttgctggccatcgtgcgaccgtatgcacccgtaacaggcaccgccagcacgtcaccacgctgaatatcggcaggaagacgcacctcgttgacgatgatatcgcccgattcgcagtgcatgccgaccacacggcacagcttggtttcgctggaaccctcacgattggcgattctcgcagtgtaatccgatccatacaatgccggacgaatattgtcgctcatgccgccgtcgacagacacgtacacgcgttccgtaaccggattgccagccttgtctttcgcggttccggcaagctgcaccggcttgaccgtgcccacacgatacagggtgacgccggtcggggcgaccgtccaacggcccggctcgaacgagatgaccggagcgggcatgccgagcgcacggttcacggtggtgaccgcatcggcaaggcgggcaagttccgtatcgagatccatggaatcctcgccatcggtgtaggccacggaatagccgccgcccaagtcgacctccggcagggtgtatgcgtcggtggcgtagaaggtcttgcgcagcagcatcatgcgcttcgcggcctggataaaggcgtccgcatcgtgaatgttcgatccgatatgcgaatgcacaccgaccagttcgagcacgtcctgatggcggtagatctccttcaatacggcgagcgcggggccatcagccaccatggtcatggcttcggcgagtttgcggtcgccttcggaaaccttctcgtggctcatgtcatacgggtatttgatgtcgtactgcagttggcgttctgcgctttcgcccggagtggcttcgctttcgcctaggcgtgcgttcgaccctgcgggggtcacgtcagccaaatcgtcgagcacgttcagcttgcttgcatcggcaccaaccggcagcaaggcgacaccgaacttctggtcctcatgcgcggtagacacgaattcgtggccgcccgcatgaatgccggacgtaacacgcaacatcacgcgagcgcgcttgccgagacgcttggcgatttcggcgatacgggccggctcgttcggctcgtccaccacgattttggcgaagccttcggtaatggcgagttcgatttccgcatcggacttgttgttgccgtgcagcacgagtcgccttccgggaacgcccgcggcaagcgcgatacgcatctcgcccatggtgcaggtgtcgatcagcatgccggattcggtgacgatgcggcagatttccttggaaagcagtgctttcccggcgaaactgacgtgggttacggtgttgttgaacgcatttgccgcggacttgacgaatttggcggcgcgggctcgcacgtcatcggtgtcgatgacgtagagcggcgaaccgaattcgttcagcaggctttcggcagtgcggccatggaacgtgatttcaccttgttcgttcacgtcggagccggccggccagatgggggtgactgccatggcgatcacatccggtctggggctgcgacgccaagcaggtcaagaccttcggcgataaccgtcttgactgcgtcattgagcttcaaacgtgcagccgcacgagccggttccggagccttggcaatgcgcagagcttcggcctgttcgctgcgagcttccggatcggtgagttccataggcaccacgcgttccacgttgtaccacttgtggtaggtggctgcaagatcttccaagtagtgggccacacgatgcggggcgcgcaggtcgccggcttcgcgcagcagggccggccactgggcgagcgcagcaagcacttcgccgtcggcggcggtgtcgagcagactcacgtcggcaccctcgtaggtgatgtttgcggcggctgcgttgcggtccacattgcaggagcgggcgtgcgcgtactgcacgtagtacaccggattctcgttggaatgcgaagcgagcaggttcaggtcgatatcgaccggggaattgtagtcggtgcgtgccaacgaataacgagaagcatccacgccgatagcgtcggtcagatcgtcgatggtcaccacattgccggcgcgcttcgacatgcgcactgccttgccgtccttcagcacattgacgagctggccgataagaatctgcatgttttcgccaggttcgtcgccgaatgcggcgcacatggccatcatgcggccgatatagccgtgatggtcggcacccagcatgtaaatggcgatgtccgccggatcgttgtcacgatggcgcttgttgcgatagtaagcaatatcagctgcgaaatacgcgtagttgccgtcggacttgatgatcacacgatccttgtcgtcaccatgcttggtggattcgaaccaggttgcgccatccttttcgtaaatgtcgccgcgttcacgcagatcggcgatcgccttgtcgacttcgccatcggaatacaggctgttctcatggaaccacacgtcgaagttcacacggaaatccttcatggatttgcggatttcgtcgaacatcatcggcactgcacgcttgcggaattcctcacgctgttcggaatcgccctcacccaacggattgccatcgttgtcagcgccaccgtcgacgcgcggcaggtcgagaatcgcaatgccgtcggcattggcctcatcgataacgcgacgcgcgatctcatcgatataagcacccttgtaaccgtcgatcggggtttcctcaccgtgagcggccgcgaccagcgacttggcgaagcggttgatctgctcgccatgatcattgaaatagtattcgcgcaccaccttggcaccgttcgcctcaagcacgcgggccatggaatcgccgaccgcggcccaacgggtgccgccgatatggatcggaccggtcggattggcggaaacgaactcaagattcagggtcttgccggaaagatggtcgttcttaccgtagttcgtaccctcgttgagcacggtgtcaaccacggcagcagcggacgcggaatcaagcacaatgttgatgaagccggggccggccacttccacgaacttgatgccatcggcattggcaagttccgcagcgaacaattcagcgaaatcatgaggcttcatgccggctttcttagccagctgcatggccgcgttcgacgcccaatcgccgtgcgcgcggtccttcggacgcatgacggcgaatttggcctgtggagggatgagatcggtggtcagggtgcctgccttgccttcattcacaaggttgttggcaatattgaaaatcagttcactaagcgcttctggactcattcctccaagtctaccgattatgcagacagaatcagccttgcgtatcatcctgcagtttgccatgcttcctatgccaggccactgaagcgtaatagccgatatagcagatcgcaacgaacggaatcatatacagcaatgtggagcgctgcgacggatcgcaaatcaccaaaaccaatgcgccaatgcacagcacaatcgcagcgatcggcacgaacggaaaaccgggggcacgatacttcaaatcgtcaaccgaatggccttgagcaagccactgcttgcggaaacgcaagtggcagacggaaaccgacgcccacaccaccagcgtggccaagccggaaaccgcaaccaacgccaaatacaccgtcgaagcggcaaccacggaagacagcaacgccaacagcgatccggccatactgaaaaacaccgcgaacacgggcacaccatggaaattcgtcttgccgagcgcgcgcggaatcataccctcctgcgcgagcgaccaaaccatacgcgagcacacatacaagccggaattcgcagcggacagcaccgccgtcaacaccacgaaattcatcacatcgccggcaaacggcatgccgatcgactggaacacgagcacaaacggactcgcgtcgacacccgactgatgccacggaatcagcgcggacatcaccgcgatcgagccgatgaagaaaatcgcaagacgcaacaccgtagtatgcacggccttcggaatcgcctgcgccggatccttcgtctcccccgccgcaacaccaacgacctcagtgcccgaaaacgcgaacaccaccgtcagcagcgtcgagaaaatcgggatcacaccattcgggagccagccgtcatcatagaaattctcaaacagcggagcatgatcgtaaccggcaatcggaatcgcaccaaacatggcgagcaagccgaccacaatgaacgcgataatcgcgaacaccttgatggacgcaaaccagaattccgactcgccatacagtcgcaccgacagaatattgagcatgaacaccactgcaatgaacgcggcggaccaaatccacgcgggcgaatcaggaaaccaacgttgcatcagcagaccagcggccgtgaattccgaagcgagcgccaccgcccaattcagccaatacagcacggcgatggtgaacgcggtgccggggccgatgaaacgcttcgcatacaggtggaaactgccggcatacggcatagccaccgacagttcgccgaggctgagcatcacaaaatacacaagtatggatccgatgccatacgcgatgatcgcgccaagagggccggcttggtgaatcgtgtagccggagctgagaaacaagccagtgccgatcacgccacccagcgaaatcatggtcagatggcgggtttccatcttacgttcaagaccgccctgctcgacttcagcggattcagcggcgtcagtgcctgcagtagatgcgttgacttgcgattcggtcatgcgcgactgctccttcatatttggctgggcgcgttcttgcgtttgcatgcgtttgcacaatacccaaacgcattactatacggaaatcggtggaaacatgttgcctgctgttcacttttagcggcaatcatgaggttgcataaacaaaaacaggctcgcatgcagcgtaagaaaccgcatacgagcctgaaaaggaattccctggagatttgcaatcagcgcgctgaaatcagagcacagcgatggcgtcgatctcgacgagagcgcccttcggaatgttgttgccgccgaacgcgacgcgggccggcttcacggaaccgatgaaggcctgcgcgtacacgtcgtcgatctcatggaaatcttcgacgttcttcatgtagatggtggcacggcagacgtgctcgatgcctgtgcctgctgcgtcaagaatgtgcttgatgttcttcagcgcctgggatgcctgctcgccggcagtttcgccagccagttcgccggtggccgggtcgatgcccagctggccggagacgaacacgaaaccgttggccttcacagcctggctgtaagcgcccagcgccgccggggcttcagaagtcgcaacctcttccatcttctcgctcataatgttctcctttgaagaatgtgttattgcatcttgcttgcgttcaggccgcggcaaaccacgacaacgcaatctcaaacaatcactgtacccatggaatcgacgcgcattgtcccatgttccaaataccggctcagcgccccggcccttcacatgtctttgtggtgggcttgatggggatcgaacccacgaccttctgttccggagacagacgctctatccactgagctacaaacccgtgcgtcaacctactttacactgccttgagatgaaagcgacactttttacggaaaaacgatcttcgaatctcggatcattattgcgaaaacatagctacggcgggtctttcgacagcacatccaaccctagaggggaaataacgggcatagaacggggaaggaacgagagatagcgtgcgccacaacgaaatttgtagcaacataacaccatttgaagcgtcttttccactagactgagaatatggttgaggattcaggcaaaaatataggcgattttgaatacacgcgccgttttttctgccgtgccctgccgacgcagttggatgataacgacagtccgacgctgatcatacaaagttattacgtgcatcaggataattacgcgctgcgcgtgcgattgaaaacaaagtccgttcgcatcgccatgactccggacctcgacccgctggccgtgctcgaaaagtatcgcgacgaattccggcttggatcagtcaccgtgaaagggccgtccgtgggacgcacgcgatatgaggcgagccgcgatttggattcgcgcatcgcaggggagctcatcaaacgcggcggacacgtgaccatcaaaaaccgtttcaccgactggatcgatgaggacggctggaacatcgacgtgttcggaggcaccaacgctcccctgatcattgcggaagcggaacgcatcgggccggtcaccaatctggtgatcccgaaattctgcaccaccgaaatcaccgaccaatcgcggttcagcaatgaagggcttgccgcgaatccatattcacgatggaaatccgcattcgaagccgaactggacgccaacggaccgcaattcctcgactatttcggcaccaatcggatggaataagtttttttaaaaaaaaacaaccgtaggccgtaaagaacgatgtagttgcgcagcctacggttgagcggtacctaaaacggtacctaaagtcaataaacgaatcagtacatgagcgtggcgaggcgacggcgggcacgcttcaaacgctcgtcggtcggctcaggaatcgtgaaatattccagcagacgcttgcgcaccggttcaatatcggccttatggccggccgcaacgaaatccagcaaacgatcgaacgcatcctgaatctgaccgccgatcatatcaatgtcggcgacggcaagctgcgcttcaacatcatcgggattgtcggcagcggcggcacgcacctcacgcacgttcgcattggcggaacgggccaacagcaacgccttcgcacgctcgcaggcggcacgcgcatcgttcggatcggcttcaagcaccttctcgtacgcggctgcggcaccagcgtaatcgccctgctgagccagcatatacgcctcctgatgctccggaggcatctgctcctgggcgctggccgccgaagcggaattcgccgcatcggaatcaggatcgcccgaatacggcgcggaaccggtcacaccggcctgctgcgcggctgcaaccagattcggaatcaccgtatccacgatctgctgcatttcctcggcagacggcaagccctgcagaatcggcatcgggcggccgttgatcaacgcgaacaacgcgggcgcaccctgcacctggaacgcctgcgcgatcgacgggttcgacgcaatatcgatacgagacagctgaatctggccgttcaactggttcacggcattgcccagctggcgtgccatatcgaacaggcggtcatcggtcggcacccacagcagcaacaggatcgggaacgtggccgacgtctgcaccatggcctggaacgtgttctccgtggtgtcgatcacataaccgccagcggccggagcaccaccagcctgccccggttcggccttcacctgatgcttcaacgcctcaagatcgacggctcccgccaaggaaactcccggattaaacggcctttgacctgccatgcttgcctcctaaatatcaacaatcaacaacattaagcgcccagcgcagcacacattgcaaacgttcgccccaagcttacgcacaatcgcgcaaccgccacgattacagcgcctcaaccttgaccggctgacgttcggaaccgactgcagtgatcttctcgccggaattcgccggaggcacatacagcgcgaccacattcacatacgtggtcttcatggtgctggtggcctgaccgtcgccaaacagcgctttttccgcatcagaagcaggctgcgattcacggccggcgccagcggaacgcgtccattcggaattgatctgcgccaccaccagatcgccgccatccgcggaacgcatgacgctgatggcaccgtcaaccggcgtgaacatctgctgctgcgatccctcgttcaactccatggccttctgcacctgttcggtcagatcggcaagcttcgtacgcaaatcgtcgtcggcgaacttctgcgcatactggctggacgcaccattctgcaacacgtcggcatacgcggcgaccgcatccttcggagtcatgaccagaccggtgtctttttccgttccctgcgcgctaccggttttggaaatctcgaaactcggcatcttcacgcccgagaacagtcgtgccacaccccacaacttgtagttctgacgtgcggaatcctggcggaacaccagcagacgcttggactgctggtcatccgtggtggaagtgatggagaacaccgaacgcggccatccactgtccgtggagatcacggcctgcgcaagatcagttggaatcgtggtctttcggtcaagattgcccgtgacctgcgccacatgaagttcgctagtgcgaatctcaagttccggcccctccaaaatcgaaccgagggcgtcgatattgcgatcgttattgcactggtcaagcgttttgagaatattcgtacggatggttttctcttgcttggcggtcagattcggcgcatcttgacgttgcgcggttttcggctgcggcagctgcccctcgcatccgcacatgccaacgaccattcccaatgcgagcacggccgccgcgattacgttgaaacgcttcttcatcacttggcctcctcgttgtcggattcgtctgattcgttgttttctgcggattcggcagattcagcggcagcgctgctttcctcctgcgcaagacgtgcgaaatacgcggcaagctcatcctgcgaaatcacggaagtctgttcgaaatcgtcgttttcttcaacaccatcagcggcagcgttctgttgatcggcaacgagattgcgcgcgccgggatcgacaatcgtaggctgcgcaacttcgttttggctattttccgaaccactcgcgcgatgcccagcatgacggcgacgcttacgcttcggcccgctcttatcactacgggcggcactcgcttcggcgttcttcacccatgcggcaacctcgtcatcgtcaccctgcgtggaaccgatgccgtcaaccatggcaaacgcgcgcttattgcgacgcttatgcggaggcatggcgaacacggaagccgaaagtaccgcaagtattgccagcaatccgccggaaagatagaacggcatggcgaaattcagcagcgaacgacgggtccagtcaagcacgaccgagcctcccttgcgatcgccgtaatcgatgatcgcaacggaatcctcggcattattcgtattagcacccttgaactgcatgttaacggaaccggcattgcatttgacggtgcgccacatgtcggaatcctggaacgcgacctgaccttcggaattatcggcggtgccctgagccgtggcgttcagcgtggacagggtggaccagtcggacagtccggtgacgcgcgtgtatttggatcccgcgatccatccggcgacatcgcgggcggaaccgatggcgatgcaaacgttcgcggatttgtcgcgcgacttcgccgaaatggtgacgcgatcgtcaaccaattgcagcacattcggatcggtgaccacatactgtgatcccgtgaccgaggcggacgccgtgacctgtgccgagggcttccaaatcgtcgcgttcaagacgccaagcacgatgcaagcaatggcaagcaagccgaaaataggcgtgacaatgccgcgcataatcttagcgtgtcgcgtaggacccgccttggactgcggcttttcctgttcttcctgcaataaagtcatagcattctctattctacattgcccctctgcaaaagcctgaaaaaactatgaaaatcaatgattgacgctaaggttgagcctatgcgcaaatctactcttttcaaagccgtcgcagccgcttgcacaacgatcatgtgcctgggtttcgcagcatgcggaagttccgacacgaagtctggttcctcctccgattcatcttcgtcttcttctgattcctcgtcgaagatgaatcagatcgccggcgtgaccgccacaggtgagcccggtgagaagccgaccgtctccttcaaaacccctatgacggtggaagacaatagctacgtcgtactgcagaaaggcaacggcgaccagatcgaagacggcgaccgcatatgcacgcagggcatcgccatcaatgtcaaagatggctccgaactcatgagcacctgggagaaaaacacccccgattgctctacggtggtcacatccgacacaagtcagatgactgaggattattacaacattttcaaggatcagaagcttaacgccacgcttgcgttcggtgtgaacgattcgaattccgctggcacctcctatttgatggtgctcacgatcgtgtcgaagtcgaaggatctgacgaaggcaacgggcacgaaggtgcttgacgttcctgccgatctgccgaaggtgacgcttgcgaaggatggcaagccgtcgatcgacatgaacggttacaggggttccgacacgttggtttcgcaggatttgatcaagggcgaaggcgccgaggtcaaggatacgcagaccgtgatcgcgcactataccggctggctgcttgacggcacacagttcgattcctcgtgggatcgcggtgcttcgtcgagcttctcgcttgatgaggtgatcaccggttggaagcagggcttggcagggcataccgtcggctcgcaggtgctgctggtcgtaccgccggaccttggctatggaaacaaggattccggtaagattccagcgaactccacgttggtcttcgtagtcgacatcctcgccgcctactgatctacatcacgattcgcttataaaaaactccctgcataacaacagggagttttttataagctagaagagtcgtagggagtcgtcttcggcacccttcatttcatcatagtcgaggatcaggcagtcgaaaccccgatcttgggcgagcacgcgggcttgcggagtgatggtctgcgcagcgaagatgccgcgtacgggggccagtagcgggtcgcggttgagcagttcgcagtagcgggtaagttgttccacgccatcgatgccgccgttacgtttgatttcgatggcaacatgcttgccactgccgtcgatggccataatgtcgaccggtccgatggcggtcgggtattcgcggcgcaccaatgtcgcaccttccccgatgcgttcgatctgttcggccagatacttctgcagatggtcttcgacaccgtctttgatcagccccggatcttcgcccaaatcgtacgtttcgtcggaataaatatgctgcaatgtcacttcgagcacgtctttggatttatctgccgaagcacgaatgactttctgcggaacctccgtagtcacgtcgtcgtcggcatgttccggagtgatgtctttgatggtgcagggcgccgccatccagttgagtggcttgtacgaaccaagttcggagaaaatcagcagactgttatcggctttgataagcaacacacgcttggcgagcggcaaggacgcattcaaacgcccggaatattcggcagagcaatcagcaacaataattcgcacgaggcactaccctaccatgattgtcgtaagccatgaatcccacgatatgtacaatcctatttttgttttgattaatcttttttgaaaaaaaacagtccgtctgctgcaactacagaatcgcaatcatatgcaattgctgcaatcgcaacagacggaccgtcagaagtatgctaccgagtgctactctgccatcttgacgtcacgtccacgctcaaccgcaacggtgagcttgttcgaatcgaaggagatgaaaccgtcggtcacttcgaaggagcgacggctgccatccggatccaccacaacgatggttccttccttgattacggtcaatacaggctcgtggttgggcaggatgcccattccgccttcaaaggcaggaatggtgacggacttcgccgtaccgtgccacacggggtggtcggcggcgacgatgttcacctgcattgtcaatccggccatcacgcaccgtattccttctgcatgtcgtgccacttcttctcgagatcgtcgatgccgccgataccggagaatgcctgctccggaacgtcgtcgtacacgccgtcgcaaatgcgggtgaacgcttcgatggtctcatcggccggcacgtaggagcccggacgaccggtgaacttttcagcgacgtagaagttctggccgaggaactgctcgatcttacgagcgcggttcacggtggtcttgtcttcttcgccgagttcgtcgataccgatcagagcgatgatgtcctgcagctccttgttacgctgcagaatcgccttgacgcggttcgcgcaatcgtagtgagcctggcccacgtaacgcggatcaaggattcgcgaggtggagctcagcgggtccactgccggatagatacccttggaagcgatgtcacgggaaagctcggtggttgcatccaagtgggcgaaggtcgttgcaggagccgggtcggtgtaatcatcggccggcacatagatggcctgcagcgaggtgatggagtgaccgcgggtcgaagtgatgcgctcctgcagggcacccatttcgtcagccaggttcggctggtagcccactgcggacggcatacggccgagcagggtggacacctcggaaccagcctgggtgaaacggaagatgttatcgatgaacagcagcacgtcctgattttgcacgtcacggaagtactctgccatggtcagtgcggtcagcggcacgcgcagacgggtacccggctgctcatccatctggccgaagaccagtgcggtcttctcaagaacgccagcctcatccatttcgccgatcagatcgttaccctcacgggtacgctcgccgacgcctgcgaacacggacacaccgccgtggttctgggcgactcgctggatcatttcctgaataagcacggtcttgccgacgcctgcgccaccgaacagaccgatcttgccgccctgcacgtacggggtcagcaaatcgatgaccttgataccggtttcgaacatctgggtcttggattccagctgatcgaatgccggcgggttgcggtggataggccaacgctcggtgaccgtgatggtttcgtcatccttcttgttgaggatgttgccggacacgtcgaacacgtgacccttggtgacatcgccaacaggaacggagatcggaccgccggtgtcgagcacggtggcgccacgaacgaggccgtcggtcggcttcagcgccacggtacgcacggtagagtcgccaaggtgctgttcgacctcaagcgtgatcttcttcgtggtttcgccctcttcgttggcggtgttggtcagctcaacggtaagtgcgttgtaaatgtcgggcaggtggcccaccgggaattcgacgtcgataaccgaaccctggatacgcgtgacgcgtccagtggtcggctctgcagccgtctcgggagccgctgtggtctgattctcagccatatgcgttcctactcttccttcttattcagcgcgtcggcgctgccgatgatttcggtaagttcctgggtaatcgaagcctgtcgcgaagcgttgagcttgcgggtcaggtcgtcgatcaggctgcgggcgttgtctgtagccgtatgcatggcgttctgtcggcttgcagtctcggatgccgccgcggtgagcaggcattcatgaatacgggactggatgtacttcggcagaatcgcgtcaagcacttcgtcgacgctcggctcgaacgcataaagcggggtcgcggcatcggcatcggattcgggcacagggccggagtcctgctgttccggaagcacgagttcaacgggcagcatacgcagcacgcgcaccttctgaacgaccatattcacgaattcggtgaacacaatgtaaagttcggaaactccaccttcgctcgccggcttcatgtaggcgtccatcagtgccttcgagatggactctgcgacttccacgccgggctggtcggtatcgccttcccaagtaccggcaacatcacgattgcggtacttgtagtacgtcacaccgcgacgaccatacacatacagttccggctgcttgcctgccgcatcgaggcgggccagcagcgattccgtttcgcggatgatcgaggaggtgtacggacccgccataccacgatccgaggtgagggcgaggacagccacgcgagggttgtcctcgtccttcttcacgatcggatggtcgatatgggtgtgggccaccagcgcttgcacggcgtcgaaaatcgcatcggtatacggcttcgcgttcaaggcgacgtcacgtgccttggcgatatgcgaagacgcgatcatctcctgcgcgttgaagattttctccaacgacgcggtggaggcgatcctagatttcaatgcgagttgcgagcccatggatcacttctctcctgcgacgatcttttcctgctcgaccggggtggcgttcttgacgttaggcttcttctcgaccagcggcttgcccgcgctggtcacgaaagtctcacggaacgcttccacagccttgtcgagggcagcctcggtgtcggcggtgaaatcttcggtctcgcggatggtcttgagaatatcggtgttgtggtccaggtagtccagcatggccttctcgaacggcagcacgtcgttcagcggcagatcatccatcttgccatgggtgccggcccacacggagacgacttcctgttccatggaatacggggagaactgcggctgcttgagcagctcggtcaagtgggaaccacggttcagctgggccttcgaagccgcatccagatcggaagcgaacatggcgaaggattccagggaacggtactgggccaaggagatcttcagcgtgccggagaccttcttcaacgccttggtctgtgccgcgccaccaactcgggacacggagatgccgacgtcgacagccggacgctggttcgcgttgaacaggtcggactgcaggaagatctgaccgtcggtgatggagatcacgttggtcggaatgtatgcggacacgtcgtttgccttggtttcgacgatcggcaggccggtcatcgaaccgccgccgaggtcatcggaaaccttggcgcagcgttcgagcagacgggaatgcaggtagaacacatcgcccgggtatgcctcacgtcccggcgggcggcgcagcagcagggagatcgaacggtaggcttcagcctgcttcgacagatcgtcgaagacgatgagcacgtgcttgccgttgtacatccagtgctgtccgatggcggaaccggtgtacggtgcgatgtacttgaaacctgcggaatcggaagccggggaggccacgatagtggtgtactccatggcgccggactcttcgagggactgcttcaccgatgcgatggtggagcccttctggccgatagccacgtagatgcagcggacctgcttcttcggatcaccggattcccaattacgcttctggttgatgatcgtatcgattgcgatagcggtcttaccggtctggcggtcgccaatgatgagctggcgctggccacggccgataggcgtcattgcgtcgatggccttcagaccggtggacattggctcgtcaaccggatgacgatgcataacgtcaggtgcctgggcctcgagaatacgacggccttcggtcttgatctcgccaagaccatcaatcgggttgcctagcgggtccacgacgcggccaaggtagccgtcgccgacgggcacggagagcacttcgccggtacgacgcacttcctggccttcctcgatacctgcgaagtcgccgagaataaccacgccgatctcgcgggcgtcaaggttgaacgccaggccaagcgtgccgtcttcgaaggtcagcagctcattggccatgcaaccaggcagtcccgtcacgtgcgcaatgccgtcgccagcagtcgcgacataaccgacttcctgagtcggggtatccgacggcttgtacgactcgacgaactcatcgagcgccttgcgtatcgtggtgggatcaatggtaagttctgccatgatcactccttattgttgtttataaattcagtcaagtcttgtttcaggcttgttcaccgtgcggcgaaccgtcaggcggttgccttcaccgtgcgctgaagatgctgcagctgtgcgaccaccgtgttgtcggtgacctcgtcgcccacctggatgcgcatgccacccatgacggtcggatcgaccaccgagttgatgtgcaccggatgaccggtcttcgccgagtaaatggcgatgagcttttccacctgctccttgctcaacggcgttgccgtggtaacagtgaccatcgattcgcccatatggcgggagaatttgttgatcagccactgaatggtctgcaagtagcggcgattgcgcagattgcaggtcgcgtgttcggccaggcgcttggtcaccttggtgaaatccgcgtctccaatcaggctgtacagcagcttgacacgggcttcactggaaacggttgcgtcatacagcttggtacgcacgaccggaaggttgagcagtgcggaatgcaactctgcaagctcgatggagacctgcaaagtcgtattggtgtaatccgcgtagtacatcatgccatcaacgccgaaatcctcaacggcattggcgatatcagacacgcggctccaacggcgagacaccagatcggacatgatctccatcacgagcggatgggcctggtctccgatcagagtcttgactaccgcaaccttgtcttcgactgggcgcgacgggtcggtgagggcacgttcaagctggatattgtggtcaagcgcgctggtgatcgtgaacagttcgttcccgatacgccatgcgtcctcaccgctgtcacgcagcttgggggccagcgagtcacgcgatacgcggtctgcgatacgcgatgcttctcctcgcattggtcacctccctttcttgaaggtttcgatcacttcttgtcgctgtccaagtcggcgatcatctggtcgatcatcgacgactgcacatcgtcattctcgagcttgctacccaggatcttgccggccagtgccgttgccagcacgccgacctcacccttgaggctcaccagagcctgctgctgctgcgattcgatggaacgctgggcggtggcggtgatctgcgccgcatcgttttcggcacgagtgcgcgcgtcagcgatgatatgcgatgcctccgtacgtgcgtcgtcacggatcttggatgcctcgacgcgagctttgctcagctgagcctcatacttcgccttggcttcatcggcatctttctgggcctgttcggccttggcgatgccaccttcgatcttggcagcgcgctcatcgaacacggcctggaacttcggcaggaagaacttgtagaagaacacggcgacgatgatcagaatgaccaacgaccagaaaatgtcgtagcttttcggaaggaacaattccatttcgctagctgcggtcaccatagtgtcttcctcctttcatgttcgtttgcgtcttcggtgttaccttgaatcaagtcttacttgatgaaggcgagcacgaagccgagcagtgccagcacctcgacgaatgccagacccaggaacatgagggtctgcagacggctgccgagctcaggctggcgagcggtgccttcgatggtcttgccgatcaggatgcccagaccgatgccagggccgatggcggcgaggccgtagccaacgacgttcaggttgccggcaacctcagcgagggtaacgatatccatgattgtttcctttctggttattgcttgacaagaagcaacaattaaaaagccggcggtcagtcgatctccggatagctcatattgatgtatgcggtggtcaggatggcgaagatgtaagcctgcaggcaagcgaccagcgcttcgaacaggaacatgaacatgccagccgcgaaggtgacgacgccgaatggcatgaacaccttgttcaccacatcaatgaggaagtactgcgtggccgaaaggcacagcgcaagaatcaagtggcccgaaaccatgttggcgaacagtcggatcgtcaacgagaacggacggataatcagcagctcaagcagctgaatcggggacagcagaatgtagatcggggccggaacacccttcgggaagatctcatccctcaggaagtggccgaggcccttttcacgaatgcctgcaatccagtattggcagaagcaccacatggcgaataccagcggcagcgtaatggttgcgcttgccgcgatattgaagcctgggatgatgccacacagattgaagaccaacaacgtgcagaacacggtggtgatcatcggcacataacgcttgccgcgcagctcgcccatcacctgatagacgatgttgtcacggacgaattcgatcaaccattcgactgctccctgccaacggctggggatgagctttgcacggcttgccgtaattccgagaaccagcaacatgatgacggtcgcaaggatgcgaacgaggatgatgcggttgatggcgaacggcgtgccctgaaaaacgaacggatcgggaaggaagtcatcgacactgggcatttcgggaccatcagcgatggtcagcatgccctttcccaatgcaccaatcattcacgcctcctgctcttgtgtcagctgttagtttaacccaacaaccgagtcgaatgtgacgttctggttacttaaccaaagcgtacttcgaagtgcgcgtcgacgcgaacggagtcccgtgcgacgcattcgactccgaatggctggataggattattagcccgtgtctagacaacatccacacacttgggcttttccatactcccatttggttttaccggcgtttcgcagcaagctgtactaactagacacagctttgtgaatcgtcggatagccgacgcaaccaatagtttgttttacgaaaacagcatattgataaaacgtttcaccaagtatatcacatataacacaggtgctgtatataaagaaagaggggccgcatacgcaagcccccaccagtaaacagccgtaaagtcacgcgccaatcacggccgcacgtcaatcacatcaatatgcggatcaatccacaaatcaatcgtgaatcacgccataaccgtcacgcacgaacggcgcaaacgcgtcgacacgcggcgaacccggctgatgacgaatcgaacgatccgtgccaagacgcttctgcgcacgaagctgcggaacctcgctcaaatcgtatggcgtggtctgatacacccaattcagccaattgcgccacaggagattggcatgggcgcgccacgcgaacaccggctccaactgcggatcatcatgcgggaaatagttttcggggaacggcacattcgtcatgcccttcttcatatcacgctcatactcctcggccaaggtgtacttgccgtactcccaatggccaagcgcgaacacttccgaaaaatcacgggtggcgatcagcccaggaccggacttcggaccccacgtgagcacctgcaactccggattgcgcgcgatatcaccctcgtccacccccgcaaggcgagaatgcggctgcaggcaaatctcatcgaagccgttcgtcaaaaagcagtattcatcctgcaaatactgcggaaacacgccaaaaatcttctctggcaaattctctttacgcacgttatagcgataattgagcgcacccatcgcgccccagcacaaatacatagtggagaacacatgcgcggaagcccagtcaagaatctgcttgaactcatcccaataatcgacctgttcgaaatcaagatgctcaacaggggcacccgtcaccacgaagccgtcgtaatagttgtcttggaacgcctcaatggtctcatagaacttcaccagatggtcggcgctcacatgcgtaccctcgtgcgtggaggtcttcatgaaatcgatctccacctgcagcggacttttcgagatcaaacgcagcagctgcgtttccgtctcgattttcttcggcatgagatttaagatcaccagcttgagcggacgcacgcgctggcgctccgcttcaggcttttcaagcgcgaaaatacgctcggagtcgagaatgtctctggccggaaggccgctggggatcttgataggcatgcttctattatggtgcgggctcggatatggcgcacttccctgcccccacgatcagccgaaaccgttataggaaaaatgaataacgcgctatttgcaacgcggttttgcatggccggactgatgcgacacgccgatttgacatatttggaagtaatcgtaaagttaatagagctgtcttaaagacaagccgacgcggggtggagcagctcggtagctcgctgggctcataacccagaggtccatggttcaaatccatgccccgctactgatgaaagctaggaattgcaacaattcctagcttttttgttttccgtcaaatctcaccaaaaccaatttccggacaaaatctggacaaaatccgacaaaaaccgggtatatcagccgagttcatcaatcgcatgtgccgaaagtatggagaaaatgcgccggatccgccaatcgcatgtgccgaaagcgaagattgccgctcaaggctgaaaatccaacgttctccaaggttgcacgcgctacgttgacctcgccaaccacatatcaccagatataaggagaacaaggcaatgcattatatgaatcaagcgaacgcgcacaacgcgacgcaggacaccacaatgcaagacagcgcaacgcacgatacggcaacaaaggcaacgcaggacaccgcgccgctgaaaggcatcaccgtgattgactggacgcaggtgcagtccggcccgtcgtgcacgcagatgctcgcatggatgggcgccgacgtcatcaaggtggagaaggtgcagggcggagatccgacacgtaatgaaatgaacgacgtggatggctcgtactccctgtacttccttcagctcaatgccaacaagaaatccatcacgctgaacatgagagatccggaaggcaagaaaatcctcgccgaactcctgaagaaagccgacgtgttcgtagagaatatcggcccgggagacgtggaaaagcttggtttcggatggaatgacgtacatacgatcaatccgcgtctgatcatggcgtcgctgaagggcttcaacaagggcagccggttcgagcatgtcaaggcgttcgagccggtcgcgcagtccgcgggcggtgccgcttccaccaccggctggtatgacggcgagcgcaatgtgcccacgcagtccggcgccgcattgggcgattccaacagcggaatgcatctgctgatcgccattctttcggcgctgttgcagcgcgagcataccggtgagggttgctatgtgtaccagtcgatgcagaatgcggtgctgaacttgtgccgtgtcaagctgcgcgaccagttgattctcgaccgtttgggcaagctttcctactatgactgctacccgaattatgagtggggcaagcaaggcaaagccattccgcgcgcagcgaatgcggagggtggtttggtgcttggctggtgctaccgcgcgaaaggctgggagcatgacccgaacgcttacgtatatatagtggttcaacagtccaagaagggcttcgagaatttctgccatgcgatgggattcgaggattggctgaccgacccgcgtttcaataccgccaatgcgcgtgacgagcataaaaccgaggtgtaccagcgtgttgaggcgtacaccatgcagttcgacaagtacacgctgaccaaggaattgggtgcgaagggcgtgccggtcggcccggtgttggattggtatgagttggagaacgatcctgatttgaatggggatggcacgattgtgaccattgaccagcaggatgcgcgcggcgatttcaagacgatcggcatgccgtttacgatgagtaatttcgtgccggattaccagcgtgcgccgaagctgggcgagcataaccgtgagattctgcatgcgttgggatatgacgacgatcagatcgcttcgctgcgtgattccggtgtgatcggcggcaacgatggcgtgcaggctgatttgaagtaacgcacgttagcgcgcactggcgcacgaataagggcggatcacaagattcgcccttatttgttatgcgtcacatccattgcagtccacgccccgcacttccgcacacaaccacatgtcttacgtcttacggtttaccgtcacaaaaagcgcatgcagtaacggaacgttggaatttcaacgttccgttactatatgcgcttcgtgagctacagtgaggatactgaatcagcccacgcagaaggggacgagccagatccacagcagacaggtggccgcgaatgccaccgtggcgacggccgtggtcgaggcgccttcttttacataaatgttgtaacggctggaaataatgatgcctgagaacgccggcggcaacgcgaccgccatcaccagcatcgaaatcttgttcatgtcaccgcccatgccacacaacagcgccacgccaaggaacactgcaggcgtcagaatcaggcggaagaacgtgttccagatggtttcccaaccgagcgagaatttcaccgtggaaagcgcgaggcccgcggaaagcacggccacaccggaattcgctttggcgatcagatcgaaggtcggcgccacctggcttggcacatgaatgcccaccaacactaggaaaatggccaataacgacgcccagcagatcggttgcttcagtgcgtcgagcaacgcctgcagattgccgttgcggttctttcccgtattcgacgtgccatgcaccataagttcggcggttttgtcggttgcggcatctcgcgccgggtcaagcgtgatatcgccttttgcatcggcctttgcattgaccgcgttttcggcctgcacgctaaacttcgctcggtctttggcctggccgaggttgatcagatacatgccgatcggaatggtcaccacgttgaccacgatggaaataatggctatgacgagattcgtgctgacggtgttgccgtaaatcggatcaagcacagcgaatccaaggaaaccaatcgtcggagatcctgcgatcagagcacagacggccgcctcctgaatgctgcggtggaacagcaaccggcacagataatagctcaccataaacatgacgatgacgccgatgaaactgatggcggtcaatgttgcgtctttcgcaagcattgcacgggtcgatttgatgatggacacaaataacgccgcaggaagcgcgatattcaacacaagtttattaagtccctgccgctgatcgtcatcaaaataactgaattttccacaaatataccctaatgccataatgacaataattggcacgatgtcgtcaacaagtatgtttatcactgtcgttctttctttatattttttctatctgcaatcttctgcaatattgtttgattgctgatattgcagatacgttgatcggatcattggttttcaggcagaaaaagtgggcgcacgcattccaccgttcgcacgcccacatgtcataccgacaaccgatgcgctacatgcgagcgccggtcgcgtagtcgtacatggtgacttcggaatcaacgagggctccgaccaccggcttcggattcaacgctccgatattgccggattccttgcccgcatactgcgcgatctgcacatgcacgaagcttggcttgcctgattcgaccgcctcgccgaccatgcgttcgacttcttccggagtgctggcatagtaacctttacccccgaacgcttcgaggaccttctcgtaatgcgcgttgtaagtaagcgtcagcggcgacggatcaccgtccgctccaaggttttcgaagtcgccgcggtagataccgccgttgttgagcaccacgaaggtgatgggcagctggtagcggcaggccacctccacttccataccatcgaagccgaatgcggaatcgccgccgatgtacagcactttcttgccagtggaaagcgccgcgccaatcgcatagccggtgccgcagcccatcacaccccacgtgccgcagtccaaacgatggcgcggttcgagcatgtcgatgatgttgcggcaatcatcgagcgaattggctccctcattggtgagaatgagatcttcatggtgtttgttgtacacctttttgatggctcccaaggcgttgaaatggctcatgggcagctgatcggattgttcgcgggtttcaaatttcgccacgtttttcgcgctggcttccttcagcatgttcagccaggtttcgtcagctttgaacgggtattcttccagagatccgttgagcagcgtcatggcggaacgaatatcccccacgattggtacgtcgatactgcgcgtgttttcgatttcttccggattgatgtcgatttggatgaatttcacatgttcgttccacgttttgccctggccgaacgacagcatccagttgagtcgcgcgccgaccagcaataccacgtcggcgttgcgtagcgcgatggaacggcagcttgccgtgctgtgtgggtcggtatcgggcactacgcctttggccatggacattggctggaatggaatatccgttttcttgacgaattcgcggatttcctcttcggcgcgggcgattgcggcgcctttgccgatcaccatgagcggacgttcggcctgccgcagcaatgcgagcgccgcgtcgatggatttgcgtgccggcaccatggcgggggccgggtcggttgccgtccacatcaggcggtcggcttcgctttggctcagggtctgcgccacggtgtcatcggggaaatcgatgtacaccgcgcctgggcgtcctgaagaggcgatatgcatggcacgggccaccgcgagcggaatatcttcgatgcggtcgatgcgcagcgaagccttgcagaactgcttggcgtagttcatctggtcgaggccttcgtattcgccttcctcaaggtcgaccacatggcgggttgaggagccgccgatcatgatgaccggatagccgttcaccgtggcttccagcagtgccggtagaccgttgaggaatcctggagcggataccgtcaacgtgacagccggccgaccggtgatgaatccgtcggccgcggccgcgttcacagcgtcctcctcatggcgcatgcccacgaatcgcatacccatgccctgcgcgatgcgcgcgaaatcggtgacgggaatgccgaccacgccatacatgtttcgtatgccgttggccatcagcacccgcgccagataatgcggcgcatcggtgaccttccgatcatcggctccctgccgttcggcatccgcacgcatgctcgcgaccatcgtttcatctgcatgttcttctgtcatcgcaacctccattcgtatcgacgacgccatgattgtagatacgtgaaaatgggagttcgtcagcagaaaaatatgttcgtctgcggcttaatttcaacgttttcagcatgatatagccgtattctcacgcacatgcggaatatattgcagctgaaatatcgcaactctcatcgagaagcatcacctccgcgagacgacatcatcgccgcatatcatcgtcgccgtaccgcatacagcatgaacgccccgcagcacatcacggcagccgccaaacccaacaccagccccatcggacttcctgtctgcggcatttcctgctcgggggcataaaggttgtcgacattgaacgtcagcaggctatcctcacgttccaccacatcgttcagcaccatcattttctgcgcggtgacggcctcatccaatcccacggactggtatccgaccttgatattgacctcgccggcacccgttgcatgccaatacacggtggttccctccagttcggcccagccgactgccgtgggctcgtcgtcctcgtcgaacacggccggaccttcgatcgtcgccgtgaatacgccctcgatcggctgtccactcgaatccagcaactgcacgaacaggcttccggaccgcaatccctgccgatcatcacgcgtcaccctcgaagaaaccggcagcttgttcgcggcctcctcccaaagctcgttgaccttgctttccagcccgtccatcaccgagaagaggtattgctcatgcctgacccacaccttttggtcgtcatagttgcggtgcaccagcacgccgatcgccgcatacgtgagcaccggttccccgtcatgttgatattcggacagcagccatgcgaggcgccgcgccgcttccgtattttccacggtggtggtttcggtgaccttatagtcggtcatgctttcgatttgccggcaataatagaatttgcccgatctcgattccgcgttcaccccgatcacatacggttttccatcgagaaaatagttgtaatgcttgccgttcgcgcgcagcagctgttcggcggccagcgcggccgggcaggtcattcccacgattatgatgcaggccgccaataccgcggccagaatcgcaagcgtatgtcgtttcatcgcattcatcgcatcgtcctttcgatatgcacatcgttgttgtcgtaattcaacaggcttgcatacttgcgattgccacatggcctttttcaagggttgtggtcggaggacgttctttttgccgtttttgtggacaacttcgcttgtcagcaaacgtaacttatccacaaaaaacgttttaccaatcgtaggtaaacaagttatccacaaagggtggaaatcgctggtcggaagatagttcacccaaatccaccttttctcctctataatcggcggtatggcagaagaagataagagcgcggaaccgcgcaccaccgcaaccaagcaaccagccgtcaagaagacgaccgccaaaagcgcggccgccaaaacggcatcggcaacgtctcagacgcctagcaagcgcaccgccgcagccaaaaagtccacggcatccaccgctcgcaagcgcaccaccaaagcgaaggccgccgcaccgcaaacggtcggcgaagccccagcccccgtcatcgaacgcaccagccccgaacagttcggccgcgtgaacgtgctcgacatcaccccgaacgttgagaacggcctgttcccggcacgcgtggagctcggcgaagcattcaacgtcaccgcccaagtgttcatcgaaggccgcaccaaggcaggagcgaccgtgtccgtgcgtaacgcacgcggccgcgaggttgaacgtttcgccatgacctgcaccaatccgggcctcgaccgctgggaagccatggtcaagatcggcgaacacagcgatctgaagccgtgggatgccgattatgccgccgtcaagcgtcagctgggcgaatggcagatcgtggtcgaaggctgggaagacacctaccagtcctggctgcacgacgccgtcatcaaggttgaagtgaatgacgacgtggagaatgcgctggaatccggcgcacagctgctcgcacgttgggctgacgcgaaggattccaagctttccgcagccgacaagaaggtgctgcgcgacgccgccaagaccatggaaaacaagtcgctgagcgccgaagagcgtctcgccgcagtccagagcagcgacatcgagcagctgcacgaaaccaacccgttgcgcgacggcctgtccgagtcgaatccgcagcgtttccgtgtggaacgcccgaagtccagcttcgcctcctggtatcagttcttcccacgttccgaaggagcctactacggtgaagacggcaagatcgttcccggcaacctcaagacgtcgatcgccggcttggaacgcgccgcagccgaaggcttcaacattgtgtatttgccgccgatcttcccgattggcgtgaccaaccgcaagggacgcaacaattccctggtagccggcccgaacgatccgggctccccgttcggcatcggctccgaactgggtggccacgacaccgttgacccgcagcttggcaccatggacgatttcaaggcattctgcgagcgcgcccacgagctgggcttggaaatcgcgcttgatttcgctctgcagtgctctcccgaccacccgtgggtcaaggcgcatccgaactggttccgcactaagccggacggcaccatcgcattcgccgagaatccgccgaaaaagtatcaggatatttacccgatcgacttcaatgccgacatggaaggcatcgaaaaagaagtcgaacgcattatggatctgtgggtcaaggcgggtgtgacggtcttccgcgttgacaatcctcacaccaagccggtgcgtttctggcaggatgtgatcgccgccgttacgaagaagcatccggaagtactgttcctcgctgaggcgttcacccgcccgggcatgatgcgcgcgctgagctatgtgggcttcacgcagtcgcactgctacttcccgtggcgcaacaccaaagaagagctcgaagagtacttcgaagagaccaacggcgatggcggtttctaccagcacaacacgttctggcctaccactccggatattctcaccgcctacgtgcgcgacaacggcatcgccggtcacgcggtgcgtgcggtgctcgccgctatgggcagcccgagctggggtatttacaacggctacgagctgatcgaaaacaagcagcgtccgggcttcgaagagcagatcgacaatgagaagtacgaagtcaaggtgcgcgattgggacagcaccgaaaagtacggtatcgccgaactgctgacctcgctcaacaagattcgtgacactcacccggcatgccgcagctaccacaatctgcacattctgccgagcgacgatgcgggcgtgatcgcattcctgcgccagaccccggccgagctgaccggcaccggcaaggcagacacggtgattgtgatcgtgaaccttgacggccacaacgcgcaccagtccatcgtgcatgtggagcttggcgacttcggtttcgccaccgacaagccgctcaaggtgcatgacgagctgaccggccgcgacttcgaatggggttacgacaactacgtttcactcgccccatgggccgacgtggcacacgtgctcaccgttgtcgaagactgatgagtttcaatcgatctgattaatctcagtcagctcgactaggaattcgtttcgattcatgccacaataccggttccacttcggtggaaagcggtattgtggttactgataatgcaaactgcccaatctcaaggagaaatgacatggcagaaaccttcaacgtcgtggtggaaattccgcgcggctccaagaacaagtacgaagtggatcacgagaccggccgcgtgttcctggaccgcaccctgttcacttccatgggttacccggatgactacggctacatcgacggtactctgggcgaagatggcgatccgctcgacgcgctcgtcatgatcccgaactccgtgttcccgggttgcgtggtggaatgccgcgctgttggcctgtaccacatggtcgacgaggccggtggagacgacaaggtgctgtgtgtgccggctgacgtgcgtttcgacgacatcaaggacgtcgaagacgtttccgagtaccacaaggctgaaatcaagcacttcttcgagcagtacaaggctctggagccgggcaaggaagtactgccgggcgattactggaccggtgccgccaaggccgaggaagaaatcgtggccgcccgcaagcgcctcgaagaatccgagaagtgatttccacgcctttctagatagctttaggtagcaatccaaggaaagcccgttgacgtacgcactcgcacacgtcaacgggcttttgcataccttccaacgtccagattccgccagtcactggaagaatcctcccgcaaaccagcccctcagcgggcaaaaacctccactcactggaacaatcaccccactaacacggcttccagcgggcagattcccccagtcactggaagaaaatgcccgcaaatcaacttctcagcgggcagattcctccaccgattggaggaaaacggacaaaaccataccctccaagtgtccagattcctccagcgagtggaagaaacaacccgcagacgggatacactcatactgcacgtgcatattcgccggggccgctatagtggaacacgtaattcacggcatgcgaacagtattcgcagaattcaaagcccgctggctggcgcggcagttctatgtcggtacccctaggcgtaggcggacgtgagactccgtcgaggcccatcccgtgggagaccggcgggatgaacctatataccagctatgttgattcaaacattacttattgccgtttccgtatcgatggacacattcgccgtttccatcggcaaaggtctcaccgtcaaaaaactacgcggcctcgacgcgttcaaaaccgccctctggttcggcggatttcaggcgcttttcccactgctcggctatttcgccgcctccacgttcagcaaatacgtgaccgccgtcgaccattggatcattttcggcctgctcgccctcatcggcggcaacatggtgcgtgaagcattcgaagaggatgaagagaacgccaaggaaaccgctgatttcgattggaagcacatgcttccgctcgccgtggcctgcagcatcgacgcattcgccgtcggcgtcagtttcgcattcatgtcgttgaacatttggatttcagtgatcatcatcggcatcaccaccggcctgttctccgcagccggtctgtatatcggtcgcgcgttcggctcgcgctggcagaagcccgcacagatcgcaggtggcgtcgtgcttattctgatcggcgtgaaagtattgctggaacatctcggattcctcgcataataatcgcaaatcagatatacaaataaatatacaaacttacagtaaaagcccgtaatcgcacatgattatgggcttttacattaccgcttaccgcaaatacttgcgattattttcctgcgctttcgcgttttctcgcgattgcaggaatcacactattagaacatgacggtcgcgtacgatgcgataccgaccacaattccggaaatcataaccggcagcagcgcaatgccgatccacggattcttggattgcggatcgggatcggcatcacgattccaccaatacgaacacgcgtcaagcgcgataatcagcaacaacgccacaatcaccgcaacagcccacgccgtcgtcgagccataatcggtggaagccgcgttttcgccggaacgaatcggcagcagcgtcgataggaagcaccagcccgcgctgccaatcatggcaacgccttccacaacattgtgcgacagcgaacgaatcagatgcgtacggttctcacgcgccatctgacgcccgaacgaaaccacaatcagcaggatcagcagaccgccgacgccggcgatccagccttcctgcatccaaaacgtgtcttcgtcacccaaaccggcagggaaaatcgcacgtccgagcatcatcgtcgtggcacacaccacggaaagcaagcccgcaatcacggaaatcgcatgccccgcaacaccatcgcggaacgggttgaacacggtaagcagcgcaatcatcgccacggaagccacaaccgtgaacgacacgattgcgggctcttccgcattcccataggaaatgccgggaatcagagcaagcacaaccagcaccacatatgcggcgatttggacggcaaacaccttgccgaacgaggctttctgagccgacttgacggcaactttttcagaggcggtcatttcgtccccttttcatgattttccataatgtggtcattacgtatgcgataccattaaatgtagccgtaagtgtccacatagttcagataaaattaatgaaacgccgacaacacacaacaagagtacaatcgcggcaacgatacaaaaccagtacaagagacaaagggagctaacgtgacggatctgacgcttatgacgttcgctagcgacccagctaccgtgcttccttctctggcgctgctttcccaccgcgtacgcgtgctgccaatggacgcggcaagtctggtgaaaatgccggaaaacaccattctttttctggatgcgcgagatgatctggccacggcgaaaacattgtgccgcctgattcatgcatccggactgtccacgccgatcgtgctcatcctcaccgagggtggcttcaccgtggtcaattcgcagtggggcatcgccgacgtggtggtggcgtccgcttccccagccgaagtggaggggcgtcttcgcttggtatccgagcgcggcaactcgccggtcaatgcggtttccggttccggagaatcgggcgtgcagaacgaagacggcatgatccactccggcgacctggtggtggacaccaacggctatacggcaagtctgcatgggcatccgatcgacttggcatacaaggagttcgagcttctcaagtacctcgtgcagcatccgggacgcgtgttcacccgcgcgcagctgctgcaggaagtgtggggctacgactattacggcggcacccgcaccgtcgacgtgcatatccgtcgtcttcgcgccaagctgggcggcgaatacgagcatgtgatcggtaccgtgcgcaatgtcggctatcgttttgatcctccggaagaagaggaaggcgaggcggcagccaaggacgccgcagcccacaacgcttcgagcgaaaactgattgtcgcactattcgcattgctggcattgcctgcgatttgcgatgcttgcgattgccacgatacttgcgatctgactgtcggctatctcactttcgtacgcgcgattgcatattcatgcgacggtagactggtgccatgccccgggaatcgaaacaagcgcgactgtcacgcatgcatcaggaatacgccgtattgtgcgaggagattccgcatccgaaatgcgcgctgaatttttcaaacccgtttgagctgctggtggcgaccgtgctaagcgcgcaaaccaccgacaaacgcgtgaatatggtcacaccggaattattcggcgaatatccgggaccggccgcacttgcgagcgccaatcccgaacacgtggaaagcatcattcattccatcggatttcatcatacgaaggcaaagaacatcatcggactttcttacgcattgtgcgaacggttcgacggcgaggtgccgcaaaccatggatgctttgacaagtctgcccggggtcgggcgcaaaaccgcgaacgtggtgcttggcaatgcttttggcgtgccgggattccctgtcgacacgcatgtgatccgtgtgaccgggcggctgcgctggcgttcggactgggcgagcggctcccccgaccccaaagccatcgaacgagagatcaccgcctgcttcccgcccgaagagtggacggacctgtctcacaggctgatattgcatggtcgtgccatatgccatgcgcgcaagcccgactgcctcaactgcccccttaacgacacctgtccgagcgcattcgcagcgtaacgcgcatgcccgctgtagcctgtgccaactagactcagcaccatggaagacaccatggaagaagaaaacgggcgggaagccaagctgaaagccgaaatcacgcgatggctgatctttttcggcgtcgccatcatgctcagcgtcatgacctggctgggctggtcgctgacgaaccgcaaaaatccgattacctccttcaccacgctcgtttccgactcctccgtggccatcggcattcagggcagcgcgccggaatcgctcgacatccgcaccgaacagggcaccgcgctggagcaggcgctgctcgaaaacgtgtacgaaaccctggtgtcacgcagcgaaaccaacaaactgcagccgtcaatcgcgaaatcatggcagatttccgacgacggactgacctacacgttcacgctcaacagcaacgtgaccttctccaacggacacaagctcgactcgtccgacgtggtctggtcgctgcaaaacgtcatcaacaacaattacgtgggatccgaccaacttggtagtctcaaggaaatcaccaatcccgacgaaaaaacggtggtcatcaccctcaatcagccgaatccgtgccttctgcgcgcgttgagcgggcgtgccggcattgtttacgatgaggaaagcacggcgaattacggcaagaaagccgtgggatcgggaccgttcaccgtggaagcctcttcgaaaacacagatcgtgctgcagcgcaacgactcgtattggggcaccaaagccgccgcatcgcaaataacgctgtattactatgcttccgaagattcgctggtcagcgccatggaagccaagaaaatcagcatggcattgccgttgagcgcgtctgccgccgatgggctcaaccagcaaagcggcatcaactccgacagcggcatcagcttcgacaaagtgatgctcgccttcaataacggcgccgaaagcccgttctccgacgagcagatccgcaaaatgacgagatacgccatcgacgcgcagaccatcgccaaagacgctccggacgcctattcgccgctcggaggcccgataagcccgctggaagacgggtatgaggatttgagcgaactgttcccctacaatcttgagcagggccagcagatgcgcagctatttcggcgcatactatatcgccgatatcgatctgctggtgcccaaggaatacgagcagatcggcaacaccgtgaaatcggcgattgaacagctcaatatcggcgtcaatctggaagtgctcgattccgcggcgcaagtcacggaacgcatgaacgcgggcacctacaatatcgcgctcaccaccatgagcggcgaaaacgatgcgagcgtattcaccgacggccagagcgtgttccattatgagaacggctatgcacagcaggcatatgcggacgcgatggcggccaccaatgatgacgattatcaggcacgcatgcgcacgtatgcacgcgccgtcagcgaaaacgcggcaagcgactggctgtacacgcgcaagaatttcatggcggtaagcgaccaattgcagggatatccgaaaaatctgaccgaccgtctgctgccgctgagcagagtgaaattgcagtgattttcccgcgattgtcaatcaatcgccgaacactgcggacaatccgtgtgttgcgctgattttcttgcgatttcggcattcggctgcagttccgtaagttgtcacattcgctttctagactagcgtttatgactgaaagccaagataataccatcaacgcgaacctcacgccgctgcccgacaaggtcggcgtggacggtctcgaagacaagtggcgcgaagtctgggacgaaagcgaagtctacaagttccagggcacccgcgaccgcaaggccgtgtattccatcgacaccccgccgcccaccgtttccggccacctgcacgtgggccacgtgttctcgtacacgcataccgatgtgatcgcgcgattcaagcgcatgaacggctacgacgtgttctacccgatgggctgggacgacaacggcctgccaaccgaacgccgtgtgcagaactattacggcgtgcgtgtggacacctccctcaagtacgatcctgatttcgtgccgccgttcgaaggcaccgatggcaagaagatcgacgccaaggatcaggtcccgatctcccgtaagaacttcatcgaactgtgcgagaagctcaccgcccaggatgagaagcagttcgaggcgctgtggcgttccctcggcctgtccatcgactggacgcagacctaccacaccatcggcgagcacccgcagcgcgtggcccagaaggcgttcctgcgcaatctggcccgcggcgaagcgtatcagaaagacgctccaggcctgtgggatgtgaccttccagaccgcagtggcccaggccgagctggaatcccgcgaatatccgggcttctaccacaaggtggcgttccgcttcgaagacggcactccgatctacatcgaaaccacccgtccggaactgctggcagcctgcggcgcactgatcgcgcacccggatgacgagcgttacaagccgtatttcggccagtacgtctactccccgctgttccacgtgaaggtgccgattctggcgcacaaggccgcggaaatggacaagggcgcaggtatcgccatgtgctgtacgttcggtgacgtgaccgacgttgagtggtggcgtgatctgaacctgccgctgcgttccatcatccagcgcaacggacgcatcgtgatggacaccccggactggatcgaagacgaggaaggcaagcgcgtcttccaggaaaccgccggcaagacgacattctccgcacgcaagatcatcgtcgacgcactgcgcgaatccggcgatcttgacggcgagccgactccgaccaagcgtatgacgaacttctacgagaagggcgacaagccgctcgaaatcgtcacttcccgccagtggtacctcaagaacggcggcaccgatcagaagctgaacgccgaactgatcgaacgcggtcgcgaactgaacttccatcctgatttcatgcgcgtgcgttacgaaaactgggtgaacggcctgaatggcgattggctgatctcccgtcagcgcttcttcggcgtgccgttcccgctgtggtatccggtgaaggaagacggcaccgccgattacgatcatccgatcgtgccgagcgaggaccgcttgccgatcgatccgaccgacgatgtgccggaaggctacagcgaggaccagcgcgacgtgcccggtggcttcaccgccgaacctgacatcatggatacgtgggcgacctcgtcgctcaccccgcagatcgtgacccgctgggaagagccgggcgaagagaaccaggcgattttcaatgccaccttcccgatggacctgcgtccgcagggtcaggacatcatccgcacctggctgttctccaccgtggatcgcgcgcatctcgagaacaagtgtctgccgtgggccaatgccaccctgtctggatggattcttgatccggaccacaagaagatgtcgaagtccaagggcaacgtggttgtgccagacaagccgatcaagcagttcggcgccgacgcggtgcgttattgggccgctgcggcacgtttgggcctggatgccacctacgacgaaggccagatgaagatcggccgccgtttggccatcaagctgctcaacgccaccaagttcgcactggccatcggccgtgaggatgagaaccatcatgtgggcgctccggcaaccgcaagctggaaccctgccgacgtgaccgaaccgctggaccgcgcagccatggccaagatggccctcgtagtgcgcgaagccaccgaaagcctcaacaactacgagcattccaaggctttggaagtcatcgagaactacttctggcagttctgcgacgattacatcgaactggtcaagaaccgcgcgtacggcaccgccgacgccaccggccatgtgccgagcgagaaggccgtgaagtccgcccgcaccgcgctgggactgggcttggatgccttcgcacgcctgctggcaccgtacctgccgtacgccaccgaagaagtgtggagctggatgcatgagggcgaaggctccgtgcaccacgccgcatggccgaaggctgaaacgtacgatgcggccgcagcagccgtctccccggagctgctcacccatgccggtgaagctctggccgcgctgcgtggcatcaagtcgaaggccaaggtttcgatgaagaccccgatcctttccgtgcagctgggcgtttccgatgaagcgcgcgaatccatcgaaagcgcattgggcgatatcgccgaagccggtcgcgtggtcggacgcatctccttcatgggagcggccgccgcactgaaggccgtcaaggaaaccgccgaagcagccaaggaagccgtcaaggaggccaaggctgataccgaagccgccatcgacgtgatcgtggccgacagcgaacttggagagccgccggctaaaaagccgaagaactgaccgcactgtagtgaagccggcggccctcgcagcacggctgctcacttcacctacagacagtccaccggactgtctgtctaacggttcagccggctaaaaagccgaagaactaatggcaactgtaggtgaaaccggcagccttcgcggcaaagccgttcacttcacctacagacagtccacaggactgtctgcttaacggctcagccggcaaagaaacctaagaggggatcttccgcgattggaaggtcccctctttgtgtatccggatcctatgtttatacatttttataaaacgggaactgcaagcagatattgagattgcgcgtccttagcaggctgcgattgcacaggcatatccggatacagcttctgcaaagcctgctgcaatatttcggcagcggccgcaatttcaacggtctcgtcaatcaaatcgctattatcaggcacaatcaacgtgcgatttccggaaccagcaatgccgtatgctgcaatcggcaacgcacttgtcatcaacatttcggaagatgcggtttttcctgttgttccagtattttcagatgcggaatctaccgaatcgccatcgctggatttctttgattccactcccccgactttcgcaacgttcttcgacgtggtatcggcagccgcgccaaatgacgatcgcaggccgcccgcgtagctcatcacatcatccatgctgatggcgttcttgtcgtccaccaagctggccacagtgccgtcggaagcgttctgctgattggccgcatccgcctgcgcgcgttcctctttgcgttgggccttgatacgcgcccgctcggcacggcccgcgagcgacgtctccaaagccgaggcaagtcccatagaccccttcaacgtaacttccgaaccatcgacagtatcgtcggaactggtcgaatcatcacctgaatcaagctgatccgcaaaacgaagcacgatctggtggaacgcactggcctgacccgtgtgctcgctcgcatccgccaacgcctgcatcgcatcgtcaaccttgcttgaagccgacttcaacttctcattgccgtcaatgttgttgcgcacatccgcaatcgcctgagattccaggttttgcaccgaacctgcggaagcccccaattccttaagccgagcggtgtacgcgtcggtgaaatccatggaatacggaatcatcgccgcagaaagctgcgactggccggcactgtaatccttggcgccgcgctgctgctcctcgcccgcacgcttgttgagttccgccaccaaaccggatgtgccacgctgttcgatggtgcgaatcacctcgttcaccgcgtcggcggcacccgtatgtcggtatgcggcgctcacatcgttgaccgcgttggccagatcgaccacggactgcgccaccgcagtatcgccgttcaattcggccgcggtgccgagaatggcggtaagttgcgtggtatcgccaatcgatccggaaagatgcgtcgtatacgagccgacgtacgcgtcgatatacccgttgaacgcctgctcatgttcctgctcacgctgggcgatggtcgtttcggcaagctccttttcatgatcgcgcagttgttcgagctgcgcgatgagctcatggttgcgttgcgatccgacattcgtcaaaccatccaccaatgtggatgcgcgatcggtcaaactggtgagattgccatagcagccagttctttcggaatcgcaggcaacagcggcgacagacagcgaactcatggtgaagtttttcgcagtcacatacgtatgaatcgtaagatcctcacccggcttgcctaccgcagcgaccaatgtcgacgaattgccggcagacacaagcacgccttcgtctgaggtcgcgtcattgccgacgcggttgggaatggtgaacgcgacgatcggcgtcagatcagccgtttcctccggtcgttccgatttcagatcgatgcggatgccgaccacgcccgatgcaccggaaatcttggatgcgctgacggtcggaccgtccaaagtaaaggtcgccgttatatcccacggcagttccacacgctcttgcggcacgcgctgcgaagacgtcgcgccctcatctgcattcatgtccgtatcagttgcagaagcggcgtcactcgtcaaatacaagcggcccggctcatcaacggactcatatgcgctcatcacatcgtgcgaggccaccgccgagacgtactcgccgttccgacgcaccgcatcaaccacattcgaaaccccgaccgcgcatacgggagccgccgaaaccagcgttaccgcaatggacgcagccagcatgtgccgcagatggacactcgccacacgcatatcacgctcaccacgcgtgctatcggcatgatgggcacaagatgcacgaaacgcaacagaacgacgcatgccgagcctctcaatcgcaatcaaaacaacgttccaaagcaatcaatgtagcgcgcggcatgccccggcaagaaacgatttcgcggaaaacagacaggtcaggcgaatacgtcgagcacacccggatcgacgccgttctcggcgatgcgcttatgcctgcgcttggcttcggtcaccacgaattcgcgatacatttcggcgatgtcgggatccaacccggcatcgacagcaatgcggtgcaaccgttcgatctggtaatcctcacgcttgtaatcggccggcgcgaaacccgcgcgggctttcagcacacccacttgggacgtgtatttgaagcgttccgccagtagggaaacgatggccgtgtcgacattgtcgatcgactggcgcaatgcagcgattttcgccacggcatcggcaacctcgggattgctttgcgcggtgcccgcatcgatgacggtttcggtttcatgctcttcttctggccgaagccagtcatgttcgctatcgctcatgcgtacaagactaccgcgcgcatgtcacttggagaagtaccgttgcagcacaatcgtggtttccgtgctcaccggcaccgtttggtggatgacgttcagcagatcctcaagcttgcttggcgaggctgcgcgcacggtcagcatgtagctgggtgacccagccacggaatcgcacgacatgatgccttcgatatcctgcaatttggcgggaatctcggcttccttggaataatcgatcggcgtgaccgcaatgtaggcacgtacggcgaggccacgcttttcatcgtcgataacggccttgtagccgagaatcacattacgacgttccagtttctgcacgcgcgattgcaccgcggaaatcgacagtcccgtagcatccgaaagctgagacagcgtagcgcggccgtctttctccagcatgctgagaatggtctcgtcgatatcgtcgaattggcccacgctcgcatgcgtggtgtcgggttcgttgccattgcctgtcatagatgcccctttccaacaagcattctgcatcagtccggtaggaccgactcccctatgcagctcacgtttccgtccattaccatacccaccccaacacacaatccgtcaactgcattttcgtaacatttccaacgaatttcgattttcaatcatttttctcctatttttttcatataccccctatatagcaatactattttcgtctttttactttcgatttcgtattttttcgtgcgtcgatttttacataccgtatgtccacaacgtgatcatccacattgccgaatcgtgcggaactttcgaaaaacaatcgaaacgcattcgaaagtagttgaaaactgcaaaacggaaaaacagccgaacagaaagacagccgaacagaaagacagccgaacgaaacaaaagggccgcatggcgattgtcatacgacccttggatgcgtaaccgcagattgcgattacctgcgattagctgttgccgttattcgcggtattgccgctctgctggatcagcgacgccatgaaatcacggttggtcgcggtcttcttcagacgcggcacaagcgtctggtaagcctgctcaggctccagaccgccaagcagacgacgcagacggtagatgatcggcagctcctgcggatcggtgatgagttcctcgcgacgggtgccggaagcgttcacgtcgatggccgggaacaggcgcttgtctgccagttcgcggctcaggcgcagctccatgttgccggtgcccttgaactcctcgaaaatcacctcgtccatcttggagccggtttccaccagtgcggaggagatgatggtcagagagccgccgttttcgatgttacgagcggcaccgaagaacttcttcggtgggtacagcgcctgggcatccacaccaccggaaagaatacggccggaagccggagcggcgatgttgtaggcacgggccagacgggtcatggaatcaagcagcaccaccacgtcctggccaagctccacgagacgcttcgcgcgttcgatggcgagttcggcgacggtggtgtggtcggaggccggacggtcgaaggtggaggaaatgacctcgccctgcaccgtacgttccatatcggtgacctcttccggacgttcgtccacgagcacgaccatcaggtggacttccggattgttggtggcgatcgcgttggcgatgttctgcagggtgatggtcttgccggccttcggcggagacacgatcaggccacgctggcccttgccgatcggcgccacgatgtcgatgaggcggccggtgagcttgttcggcgcggtttcctgcttcagacgctcctgcggatacagcggagtgagcttgttgaactgcggacggttctgtgcggcctccacggtcatgccgttgatggagtcgatggactgcagcggcacgaacttctgacgctggttgcggcggtcgccctcacgcggggtacggatggaaccgtgcacggcatcacccttgcgcagcccatacttcttgacctggcccatggaaacgtacacgtcgttcggacccggcaaatagccggaggtacgcacgaaagcgtaggaatcgagcacgtcgacgatgcccgcgacaggcacgagatcctctttcggctcctcgtgacgctgttcgcgttcaacattgcgatccgtgcgctcgttgcgctcgacgcgatcgttacgctcgttgcgatcattgttacggtcgccggtacggccacgacgctcgtcacgctcgtcataatcgcggtcacggccacgcaggcgacggccacgacgatccacgcggtcacccctatcgctgacgcgaccgcgaccacgacgcgcgaaatcaccgtcttcagcctcgtcacgacgttcgtcatcatcactgccctgcgaaggcaacgtggcgagaatgtcatcaagatcgcgcacaacgtcctcatccttcggcccttccaccgcacgacggcgacggcgcggctcaacgtcggacgcatcatccttacgatggcgacgacgatcatcctgcttcggcgaagcatcgtccaatcccagttcggccagcagatcggtggcagcgtccgcatcacggcggcgacggcgcttcggagcctcatcgatgctgtccagggcgttcaccgcggccatgacatcggccgcctcctcgctcgtcggagcctcagcctgcttgcgacggtcagcacgctcggtgcgctcggcacgttccgtctgttcggagcgctccgcacgctcagcgctatcagcacgtccggcaagggtcttcctaacggttttggccgtctgcttttcggactgctcagcctcgttggctttgctttcggcagcctcgttggacttgccggattcctcagccgtgttcgccgcgacctcagcgtctgcggtttgggcttcagcaggagccaccggagcggccggtgcagcggacttcggagctcgcacggtcacaccggcaggcgcttcaccgccggaacgagcggcctgaagcgtcgcgataagttccggcttacgcatggtggaggtgccacgaaggcccatctgcttggcgagctccttgagctcaggcagtttcatgtcttcaagattcgggctggttgccactggtttttgcctttcccctagcttccgcaagcacacgcctgcaacagctgtaaaaagagatacggaaatttccgccactgaaagtccgccgcgaaatatcacggttttcgaactttcctaaccatacaacgtcatccagaccaacgcaacgtaggcgtgccaacgtattcatgccaatcaagcattcaagtcaatgacaaatcgcaaatcacaatgcgaaagacccgccatgcgatcacatgacgggtctttcgctttaccacatgctttacagcaacaggtgcaggtcttgccggaacctacttttcctcgtgatagctcttgtcggtattgacggaccatacgttcttcttggacgtcttgccgttcttgatattgccgacggcctcgattgcggtggccatggaatgatccatgttgttgtaacgatgctggccgttgcggccgacgcaatacagattgccgaaggaatcgaggtattccacgagctcaggcatgcgatcgtaggtgtcgaaatatgctggatacgccttcttcacgcgctcacgatgggagtcgatcacgtcttgcggaccgttgatgatctgcatgcgcgtaagctcctggatggcgaacttcttcgcttcctcgtcagacatgttccagaaggaatcgccttcttcgcagaagtattcaagaccgatccacacggtgttgtcaacgtccttgaccaggtacgggctccagttgttgaagatctgcaaacggccgaccttgtagcccggatcctgcacgtaaatccagcaatcaggcacgatcggcgggttgccgagggtgggaatgtcggtggtgttcgacaggcgtaggtgcttgacgagcagaccaacggtcacgaagtcgcggtacggcaggccgttggcgatttcggtcatgtccttcggcgcgggctggctggaagcgtccacggcgttgatgagatccttgacgggcatggaggagatgaagtcgtccgcggccatttcggtgcggttgccttcggaatcctcatataccacggatgcgatcttgccgtcggcctggcgaatctccaccacgttcgcgtcggtgatgaccttcacgcccgcggcctcgcagttggcctcgacggtttcccacagctggcccggaccatacttcggataccagaattcctcaatcagcgaggtttcaacctcagcattgctgcgcttcttcggcaggagcttctggaacgcgttcttcagcacgcccataatgctcaggcccttgacgcgctgcgcaccccaatcggcggaaatctgggacggatggcgaccccacagcttctcggtgtacccctcgaagaacatggaatacagcttgcggccgaaacgattgatgtagaagttctccagattgtcttccggcagcttgtgcaccatggacttcaggtagctgaagccggcaacaagcgtaagcttcggacccatggccttcaacgtgttggcgctcagggaaatcgggtagtcaaagaagtggcggttccagtaaatacgagacacgcgatgacgcttaagcatcaccttgtcttcgacttccggatccggtccgcccggttccatatcgtgctcgcgaccgagcttcttgtcatcatagcttggcgcgccctgcagcggcaggacccccttccaccaatccatgatgcgttcgtccttcgagaagaaacgatggccgccaatatccatacggttgccatcatgcttgacggtgcgggagatgccgccgaattcgcgggtcgcttccaacacagtcacgtcgtagttctcggagccaccgtccttgacgagctcccaagcggcagtcaggcctgcagggccaccgccgataatcaccacggattgcttttgcgtcactttgaggtctccttatgaaaacaaaaatccctgatagtctacccgagggtagggaaacgaacaccgcaacttgtgcgaatgcttacaaaatcaagccaagtcagccggatatacggctatcgcatcatgcaaaacgcaatcatcaaaccggccgatgcacgacccgactgcgcggccaaagcgcgcaaccacattacgcgatccaactacgcgaccagcaaccgcacaactggcaaccgcgtgaccggcaactgcgcaactagatggaatcaggaatgtcaatatcggttttctgcacttcctcaacattgacatccttgaacgtgacgatacgcacgttcttgacgaaacgactggaacgatagacgtcccacacccaagcatcagtcaggcgcacgtcgaaatacacgtcctggcctgcggaacgcacattgaaatcgactttattcgccaaataaaagcgacgttccgtttcaacaacatacgtaaacagcttgattacgtcgcgatactccttatacagagccagttccgcgtcggtttcgtaattatcgagatcctcggcgctcatcacttaccttccgtatcgcgcttgcgaccacgaccaagcgtgcgccaccaagcttccttcgacgtcttacgctcgcccgccgtgtacggccagctgttttcggcatcggcatcgccagtaacggacttgcgatcatcatgctcgctttgtcgcgcaggttccgcgccttccgcgtccttccgcacagcctcggccacgtcaccagcaccatcggaagaagctttctgcacggattgcgcagctgccgcggcatcgttgacatccgtaccttccgcatcatgcttcgaagcattcttctcattcagtcggatggcaatggaatgctcgcgcgcgctcaacgcttccttgacgcccggattatcttcgatcacatgcatgccgaacgcgtcaagcgaacggatcgggtcgaactcgtcaaccagcgtgtccataacgatcagatcctggtaacggttctgcgaagcgttccacaaggcgtcgcgcgaacgaccggacggcacgaatcccaacgactggtacacggacacggaacgcgtgttctgctcgggcacggcaacccaaatgcgatgcatgccaaggcctgccggttccggcgcaagtccgtacgtcatcacgcgcggcatgatgtcacgcgaatagccacggccgcggtaatccttgccaagcaccacctgaatgcgcgcggaacgagcccaaccgtcaatatcgatcaggaaaatcatgccaatcacattgtcggaattcgcggcatcgatctcgccatcgccatcatggtcggcttcggtgatgatggaccatgcgatcgtgcgacgcgactccggatcccccacaccggattcggtcggcgtttcgccttgggaccatgccacggaacgacgcacccacgcatgcaccgcgccacgctcggcaacccgatccttgccggtgattccggaagcgccgatgtacgccccaatggcgtccatacgttcaagatcttcgatcacggacggacgcagatgcaccatctcgcccttgatagacggaatgacgatgagatccggcaattcacgcgactgctggtccaactgctcctgtgtcgcagcctcaacttgttctggcattattcctgtcccctacatcattgcaggcacgaccgtcgccgcacccataccgagggtattgtacccgactgtatgtcagctgtgaatccgcgcggcggcaatcgctgtacatattcctctaccagcataacctgatgttgaaggacatgtcggcaatcgtaagaaaatgcgcttcgcgattatgcattctctttctttgaaatcccttttccggaataacgaaaagaaaacgcacgtcccaagctttttggaacgtgcgttttcctgcgattcaacaatcggctgtaatcgtcagcaatcgttgtaaacgttacttgatcttgctcatcacgatcttggtgacggcctttgcgtcagcctgaccgcgagtggcacgcatgacggcaccaatgatggcgcccatcggcttcatattgccgctcttgagcttttcaacgatgtcaggattggctgcgagagcctcattcacggccttttcgagagcgccgtcatcagacacgacctggaagccatgcttcttgacgacctcatccggagtgccttcgccagcaagcacaccggcgacggtctgcttggccagcttgtcgttgagcttgccatcggcgatcagcttctcaacctcagccacatcggccggagcgatcggtagctcttcgaggctcacgcccttgttgttggcttcacggctcagctcgcccagccaccacttcttggcacctgcggcggtggcaccagccttgacggtctcctcaagcagatccagagcgtcggcgttgagcacgtcacgcatctccaaatcgttgaagccccactcgcccttcaggcggttgcggcgctcgcgcggcatttccggcatctgagccttcatctcttcgatgtgctccttggtgatgtgcagcatcaccagatccggatccgggaagtagcggtaatcgtcggcatcggacttcacgcggccgcctgcggtggtctgcgaagcctcatcccagtggcgggtttcctgcagaatctcgccgccttcgctcagaatggccgcctgacggcgaatctcatactgaatggtcttttcaataccgcggaacgagttcacgttcttggtttcggaacgggtgccgaacggatcggacgggctgttgcgcagcgacacgttcacgtcggcacgcatgttgccctgctccatgcgagcgtgggaaatattaagcgcacgcacgatgtcgcggatggcgcgcatgtaggcaccggcgatttccggagcacgatcgcctgcgccaacgatcggcttggtcacgatttcgatcagaggaacgcctgcacggttgtagtcgaccagggagtggtcagcgccttcgatacggccgtcagcgccaccgacgtgggtgttcttgcctgcgtcgtcttcgatgtgggcgcgttcgatcggcacacggaacacggtgccgtcttcaagttccacatcaagatagccgttgccgttggtcggcttgtcatactgcgagatctggtaatcgcgcggcatgtccgggtagaagtagttcttacgcgcgaactggctccactcggcaatttcgcaatgcagggcaagacccagcttgatggcgtaatcgacggcggtcttgttgaccaccggcagagaacccggcagaccaaggctcaccggggtgagctggctgttcggatcgccaccgaacgagacttcggccgggcagaacagcttcgtggtggtgctcagctcaacatgggtttccagaccgatgaccggatcgaacttcttgacggcatcggcgtacttcatcaacttttcagccattttgttttctttcctccgatgcttcctacttgttcaagccgtcgagccacggggtcttcagggactgccagatcggaccgttccagtcttcctcgagagccgcctcaagtgccgcggcaggcttgtacatggcctcgtcacgctgctgcggagcgaggaactggaagccaaccggcaagccgtcgtcgctcagaccagcaggaatgctcatggccggaacgcctgcaaggttggccggaatggtggtgatatcgatggcatacatggccatcggatcctcggtcttctcaccgaacttgaatgcggtgaccgggctggtcgggccaacaagcacgtcgaccttctcgaaagccttcttgaaatcgtcgatgatcagggtgcgcaccttctgtgcggaaccgtaccatgcatcgtaataaccggcggacagggcatacgtgccaaggatgatacgacgcttgacctcgtcgccgaaaccggcttcacgagtgtaggccatcatgttggcggcggtctgcggaacgcctgccggcggcatgacgcgcagaccgtaacgcatgccatcgtaacgagccaggttggagctgacctcggacggcatgatgatgtagtacgcgccaagggagtacggcaggtgcggcagagacacttcagtgacttcagcgcccatctcctcaagcttcttgacaccttcgttgaagcgtgccataacgcccggctggaagccttcgccgccgagctccttgatcagaccgaccttgaggcccttcagatcacgcttcatgccttcgcgggcggccgccaccatcgggcgaggactttccggaatggacgtggaatcgcgcttgtcgtggcctccgatcacttcctgcagcagggccgcgtcgagcacagtacgggagcatgggccgatctggtcgagcgaggaagccatggcgattgcgccgaaacgagagacaccgccgtaggtcggcttgacgccgacggtaccggtcagcgagcccggctgacggatggagccaccggtgtcggtacccagggcgagcggggcttcgaacgctgccactgcagctgcggaaccaccgccggaaccgcccggaacacgttcggtatcccacggattgtgtgtggtctggtaggcggaatgctcggtggacgaaccctgagcgaactcatcgaggttggtcttgcccagcagcggcatgcctgcagccttgagcttctcgatgacggtagcgtcgtacggaggcacccagccttcgaggatcttggaggctgcggtggtttcgatgcccttggtgacgatcatgtctttgatggcgatcggcacgccggcaagttccggcagctgtgccttttcctcatcggacttggcatcgaaggcgtcggcctgttcgagagcctgatcgccggacaccttcaggaaagccttgatgctcggctcggcggcctcgatgacttcgagatgcgcttcaaccagttcacggctggaaacttccttggccttgatcttagccgccatctcggcggcggaaagcttgacgagttcgctcatgtcactcctcccccagaatgcgcggtgcaacgaacatgccggcctcggaaaccggagcgcctgcggtcgcctcttcctgagtcagcggggtttccggcacatccgggcgcaggtaggcttccagcggaatcgggttcgcggttggttccacatcgtcggtagcgacttcctggaccttgttgatggattctgcgatgacgttcagatcgccctgcagacgggtgatctcctcgtcagtaagtgcaattcgggccaaatcgcccagatgcacgatttcttctttggtgaaagtaggcatgtccctaacattaacgcgtctgtgtgacgagcgcccgcccatttcgtctcgccccgcaaccacgtcacaccggcattgccggcacgccccgcacagtccaaaatcacccacccactggaggaatcctcccgctgacacgcccgcacagtccaaaaacctccagtcactggagaaaactggactctaggatgaacaatcctcccgcaaactggactgcctcccattttgagcaacaaaaagggaggcagtccaaaaggaaggtatcgtcacgcgaagtcaaggttgaaagccaaggttgaaagccaaggttgaaaatcaagactgaaagccagaactagaaatcaaaactgaagccagaactggaagtcaaaactgaaagtcggaactggaaatcaaggctgaaaatcaggaacggaaattagggttggatggtggcgtgttgggcgatccaggcgtgcatggagactgctgcggcagctccggcgttaatggaacggactgagccgaactgagaaatgtagaccacgtcatcggccagctcgagcgccttttcagacaaccccggaccttccgcgccaaacagcatgaggcatcgcttcgggaaatggtaggtttccatcggcaccgcgccgggaatgatatcgagcgcaatcacccgcgcggccttcaactcggcgatacgctgattaatcgccgccaactgcgccatacaagtggactcgtttccatgttcaataccactcgtagctgaaacgtccattgaaataccagatggagcgcacccagcaacacggatctcagctaacgaagccgcctcgctcatgcaggcacagttcgctttttttgcattttcgcgcatgcggaatgcgattgcggccgcttgcgattggactgcggcgatttctccggcaatgcgcagcttccagcattcgacaagctcggctatggacgggtggttttcgacgtgctggtacagttccgtcatcagcgcgcccttgcgattccacttgtgcggtccgacgatatgtacacgtttcgcttggaatgcgttggcagtgcgcaccatggatccgatattgaaatcgtgcgtccagttttccacggcaacttcgaaatcatgccgaccatgatcgtcaagatcatctttaatggccgaaaccgtccagtagcggtaccggtcaagcacgttacgacggtcgccctcatcaagcagcacagtatcgaatcgacgatcataattcggtgattgcggatcatccggacgaggttcgccaggatgcgtttggccccacggacctacgcccacctcacgaaaagccggctctccggacgctttcgccgcaatatcaataggattaggctgatgcacgattttcctcacattcgtcgtccgatatttcgtcgacaggtaacttctgttatatcttccaccattcgcccacgatcaacatcggcaatcgcagcattgcccaccgcgattttggagatcgcctgccgtcaaccgcatccgtactgccgactttatttttcctttactcatgtcagcatgaacgtcagcatgattccaacagaacaatacccgtgaaacattccatgaaacacggcggatgacatcattaaaaaaaccgccggtacaaccggaaagtcgcgctggtcagtgaagctccgactccttgaagacctccacaaacggcagttcagcttcggacccatccaccggattgacgactttgatcgacgggtcggccatatcgacgccaccaatcaacgaagcgacagcaagcacttcggcgccttcgttcttcaccacggagaagtcaaggctcaactcattgccgttacgcaaggtgaccaaagaggacgtctgcacatatgacttttcagacagccaggaatccagcaacaccacacgtttaccggcaatcgaaggccccttgatggacggatacacaaaatccatcacaaaaccgttaaggttttcacctcgagaagcggccgcctggatcatagcggaaaccagcggaaccgcagccgcagtcagcgcaccaaccgcatcgaaatcatcaacggaatagccggcctcttccaacgtatccaacaaaatatgcccaacaatcgacgctccacgatggtcgaacaacactgaggaaagttccgagaacggcttatcggccatctcggcctgcagcagcgacttgagctgatcacgcggttcaagcatggcgaaatcaacggctgcgttcacagtatcgccagcggttgcggcagtggattcagcaaccggcttggtcttacggaaagtcttctcttcggtcatagtcccagcctaccgtttctactcgtcaaaagagtgacagtgttggtgtcaacaagcaacgtccaatatctcccatcaacagatggtcaacagaaaatcaacatttcaaaagtcaggccggtctcaccataaagatgaaaccggcctgaaccgaacccaagaaaccggcgagagcagcagattactcacttaagcgcgagaatccacttcagatctgtttcaaactccgcttccaggttcgcttccggactctcatctggtctcgcttccagccccgctgacgcaccggcgcaataccacacccgctcccaccagcaacaccatcacggcgattacgccactgacagccgaaccggtattggcaaccttgttgccggtcttggaagcagtattgttcttaccattgccagcagaattaccggaattaccaccagaattatccgaatccccaggtttgtccgaatctccgggcttgtccgaatcgctcttcagcgaagcctgcgccgctgtcaacgcttcagacgcctcatcgacgtccgcctgcgacagcccctcatccaaagccttagacagcgccagtttcgcagcgtcacgagcctcaacgaacgcatcccacttcccactgtcatatccgttgttgaccaccgccgcagcatccgcaacagcggaagacaacgcatcggtcttcgccatcgtgatcgacacgccttcatcggtaggattgatggtttgcatcagcccgttttcgtcgaaggtgatctcgtcgatcgcggtttcgcggtgaaagccaagcccggaagtaaacacgccaagcggagtgtagtgacggtgatacgccatgaaccagcgctcttcgccattcgcgtccaccacgtgcacttcggactgatgggccgtaccctgcaaattcttcgacgcgtccttttgcaggagcacgccatggttgtcgatatcagtcacggagccatcttccttgaacagcgacggcgaagtgccgtattcgacgtggtaattcgccgatccggcatcgtcgcatgaccacgtccagtgatagacgccatcgcgcttggacaccacaacggattcccggaagttgttcagaccgttgatccgtttgaccgttcccggcaccacgctcatcatgtcatcgctcaattgggcgatggccgccgaaccgttgccgtacaggatatacgacgtgccgtcatcatcggtaaaaatcgacggatcgatggcctgccccccagtcacaccctccatcgaacgcgtaacgatggggtctttggccgccttgtatgggccggcaggcgaatccgctaccgccacgccaatcgccgattcaccgctctcaagcttggcgcagtagtagaagtaatacttgccattctttttctcgatggtcggcgcccatgcggatccgacagaccaaggcgaaattgccgtattctcgtcgccattcgtggtcggctcgtgattcttatccacgtcgaggatcactccttcgtcggtccagttgaccaggtcggtcgagctgaaagcatggaagtaattcccactccatcccgagaagccatcagtcgtcgggaaaatccagaattttccgtcgaaataatcgatatccggatcggcatattgccccggcaaaaccggattatttgactgaaccgccttttcgagcgtccatttttcgctaacgataccaccgttgccgtccgaacattcgattacaagcgtatgcttcttggacatgtcaagcttgtcaccgctggcaaacgacttgccatcgaccgtgacactcgcatcgtcgtaagtcagcgcgaacgttaccggaacggcgttgatctcggcacgattgttcactacggaggtgatggttttcgcgtcgcaatccatgctggtacgcacgttgctgtgcttatcggtgccacgcaatgcatctgcttgcgacgaggtcggcacagtgcccacagtgatggatgcgagcgcgggcgcgttgttccgttgtgcgatttcgttggcgttcagcgttcgattccagatggtcagattgtccatcagaccggaatagtattcgccggatccccagttggctttgccgatttgcaggattcctccggtttcgccaaggatttccttgacgcccagcccggaaacgtccgtgctttcgccggcaagcacgccatcgatgtagacacgtgtcgtcttcgcgtttaccgtgacggtcacgttgtgccatccgtcgccgcttgtggtggccgatgcgttgcctcgaccatctcgactgccgtcggtgttgtatcgttcgacaacaacgctgccgaccttatcaagcactccgatgtagtgttcggattggttgtacgtcggggcagccgtggacggagccgcgtagaaggtccagccggtattgccgttggagtcgggcttagcatcgtaggagacggtgaactcggtggcgtccaacagcagtgcggcgccattggtttgcgtgacgctcagccaggaaccgctgcccagtcgagcggctttggtgccgttgttgccatcttcaagcttggccgttccgtggattccggcaactgccagatcgctggtgtaaccggtttcctcatcgtcaaaggtgaattgcgcgatcggattcttctgctgtgccagaggagtgttgggcgcgatatgttcgccgtaagctgcgagcacggcggtttcctcgtcgacgtttagacggacgacggtgccatggcggaatcgctgtccgaaattggctgaggcctttgagaatgtgcccgacttcttcagggacgacagttttgcgatggtccagccggcgtagcctccgttgtcgcccatcacaatccacgccccatcagtgccttggtacacggtcaaaccttcgatgcgggtgctcaatcctgattccgaggtcttgacgactttgtctccagtaattttcgacgtgccgtcggcattgacttcggagtcgcgttcaactagtcgggtccacttctgcgcttccagagaatccgcggtgtcgatcaccgtgtaccaatccgatgtggagaaacgatagtaggatccgtcatcgccttgcacgattgtggtgtcgatgatgttatgcaggtcggccgagctttgatcgatccagatttgaggattctcaaacgtggtgaagtccgaagtgtatgctttgtacactttcagcgcggtattgccagtagtgggattgtctccgcctgttgacaggtcgcggcttgaccaatacaccagatatttgcccgcttcggcgtcccagatcgcttcgggagcccaagcgttgccgactttgccttccaaaccggttgataccagttcaggatcggtccagatgacgagatccttggatttggcgaccacaagataggtgctggcgttgatctgattccaagaaccgcccgaagcgcttccttcggcgtgcagatcggtgccgagcatcacatacttgttgccgtccgcatccggctcttccaagcgaatcagatgcggatcgcggatgcctttggtgccttgcgtggaagacatgattgcctcaccatcgttcagcgcctgccatttcaggccgtttttgctgtatccgtaattgattttttcatagtcggatgcgttgaagtacagccacagatatccggctttcttggcagcatcgtcatctttgggatcatccttgccgtcatccggcttggataccgtcacggttgcctccacgggcatgcgggagtcatcttgggcggttcccttgacggtgaaggtgccagccttggcgtactggtccgcgtcgatgtcatcccattgcacgtcagcatcctgttcggagccgtcagccattgtcagatgcacggtttccggcatcgtcggagcggtcccggcgttagtggacacgtcaaccgatgccaccgacttgaccgcgatgctcggcgcataggcttcaagcacggtctgatactgggcgcgggtgaccggaaccacggtgccgtgacggggcttgccaccatcggaattgacggggaagttctcctcgggcatcttgtcgccgattaccgtccacttcgaagcgtcggaaatgtcggtggtcgccatgggcacgtaatggttcggacctccgtgatagctgggctggtcggcgaacagatagtattggtatccgttcacatcgccttcgttggctttgaacagcgaggggccttcgcctgcggagaaggtgccaccgtatccgttggatttgtcgttgccgatcgcggtgccgacttcgctccacgagctgccggacaatgccgtgctgtagtctttgatgccggcttttccaatggaatcggtcagggtgttggacttctcctggcgcaaggtcatcgacttttcatccttgtagatgcggtagtaggtgtcgccttccttctgcaccgtcacatcaatggaacccgctccagcttggcctctccgatccacgtcaatccacgtcttcggtttggagaacgtgatgaaatcaggcgtcgtcacatacatcatgcggttgtaacttggcgaggtacgagtgctcgaatcgtcattgtcgtacagattcgaggcccagtagaccacatattcgcccaactcatcatcccagtaggcttccggagcccacgtgttgcccgcgctgtcgtcgctgaccttgatatgacgctggttcgtccagttcaccagatcattggattcccaaacctcgatatacagcgaaccgttgtactgtgccgccgagaagctgcccttcctgccggagatcttcagatcggtggcaagcatgtagaaggtgtcgccgtcatgcgagcgcatgatgaatggatcgcgcaatccctgttcgccttcggtggaggtgaacagcggagtgccttcattgagcgtattccagtcgagcgcgttgttgcccttggaagcggcgaggcttatcttctcgcctcccacgccttcgccggtgaagaacgcccaaatgtatgcctcatctttgctttggtcggaaggcatcggcgaaacggtgatcgggaattcccggtttgcggtggcaccgttgttcgtcgccgtcgcttccaatgtcacgttgacggaatctttgccggcagccggccgattcaccgatactttggcattgttctcgttatatccttcggcgatagaagcgttcgcaccgccatcgttcttgacggaccatgtaatggcggagccattgtcaccgaccgtcggcaccacgaaattgctacgaatatcgtcggcgtccaagatattcacggcatcaagatcgctttggatcttctcatcgtccgatatgatgtgcggaaccgtaaccttaaacgtccgcaactgatcgtccgagccgttgagcttggcagtcaaagttgccacagcatcggcttcaccgactgcggggcgagtaacttgcgcggttccatcttccgtgaaccggatcgcgttgttatcgctcgaccaaacgatcggcacaccgttgctttccgtaatgacggagaagttttcggttgcctcttgcgcaacgctgatggcgttgaacgcatcggtcgccgcagctagggaactgtcgtaaatcttgaaattgtcgatcagaccggtaaagtattccgcgccccaattcgctttgccgagttgcagaataccaccgtctttgccgaggatttctgtcagatcatggctttctttggcctccacgctgttcacaagtgtgccgttgacgtacattgtggtggattcgtcggatacgactacatccacgtgcttccagccgacactggaagcaccgctgacattggctcccgtgcgaccgcccgtggtgttgttgtagcgttcgaatgtgatcttgtcggttttgtcaagaaagccgatgtaatgctcataaccataggttggtttcgccgcatcgcgggccgcgtacagtgtccagccgctgttgccgcttgatgcgggcttcgaatcgtagctgatggtaatggcatgcttgccttgaagcaccgcactaccatccgcggatgtcaggctcatccagaatccgctggacaggttggctgcagtggtgccgtcttcgccggttcccgtggccgtctggccattaatcgaagcgacgatatttcccgattggtaggttccggtttgtcctgccgtaagatcgttgaaattcagatctacaagcaggctgctttcgttcttgtatttgtcaagcgccgatggctccgatgccatcgtacttggcgcaacgagcagaacggcagtcatggttgcggcggcgacgatagcgccggtcaaccgtttgacggtgagatgttttctcgtattcataaatattccttgaagaattcagcattagtgcatgcgattcatgcataacaaggaggatgagaaaccgtccggaaaggaggtaaatagaaccggacggtttctcttacggggcttcgtcttgttttcacgcgggatggatggaatacgtggaaacggaataggcgaagcgttcatgtgaagtcagcgagctgccttccagcgacgcagaacagccaacgcaccaccgatggccaggattgcggcgaccagcgctatgcccttgacattggcaccggtattcaccacaaccgcagccttcttcgcagtcttcttggtggtggtagtaccgggcttagtggtcggagccggagtcggatcaggatcaggagtcgggtccggagtcggatcaggatcaggagtcgggtccggagtcggatcaggatccggagtctgctcgattgcatcgtcagacacgttgaccaagttatcggtgtacccaccgtaggccgccgtgatcttggaaactttgcccagcgcgccttctggagcggtgactgtggcgacgccatcagcattgagcttgacggtttcggtccagtcgccagcggtgaagacaaccgatccggccacattgccgccgtccttggcggtgacagtggcagtcagcgtgtctctaccgcgctccagcttggtcgtggagtcagtcgcatccggagtggtggggttggcggtcgtccaacgatgcatgttctcggcgatggcagcaggcacattgacgaacgcaccgtggcgggtcggggtcggcatgccattggcatacacgtagccgctcacacccgcgttctgatccttctgagtatgccatccatcggtctgcgacagtcggttgttccaatcgcagctcagcagagcggattcgctggtcatgtacggctggtatccaccggaatcagccatgatgaccatggcatcccctgcttcattctgatacttgtctccggcgttgagcttgatagcctccggaccttcgaacggcaagatgcgctggtcaagcagctgccagccggtttccggatcggtatcgggagatgcctcctcggtggtggccgtcagcaccttcgaacgctcaaggaacgtggacttgccgttggtgatgtagcttccggcagcgccgctttcctcgttcttggtgaagcggtagtagtagtcgccaaccttgatgaccgtggagtcgatacgggaatagttggtatcctgccacatcaccggttcggtgaaggtcttgaagtcgcgggtgatgcagtacagcagcacgttgtacgcgtagccggtattggtgctggtcaccgcggtggaacgggtgtcgtcggtgtacatacgtgacgagaagaacaccacgtaagcgccgagcgaatcatcccagtaggcttccggagcccacgtcatgcccgcattgtcgacattgattttaatgccggtatcgccgtcggccgcgttggtgcgagtccagttgaccatgtccttggactcccacacttcaaccttgagcgaaccatactgctggttctggccccatccttgtgcggaaaccttcagatcggtggcgatcatgtagtacttgtccccgtcatgcgacttgagcacgtaaggatcgcgcaggcccttggtatcggcgtaagattcgatgaccggattggaattgttgatttccttgaaggagaagaagttgttgccttccgtggcagacatgtacagcgcttcgcccgtcttaccattcgtcttgtcggaatccgacaggaaggtgactgcggcataagcttcgtcaggcacttcgcgagtcttttccttgactatcaccgacactttggcggttttggtgacactgccgtcagcgttggccgcggtggcggtcagctctaccggcgcggcatcgccgtcaccgtatgcagggcgggtcacaacgcctgcacccttatacgggtcagcggatccgaccgacggcgcctggtaatttgtatcggttccggtgatcacattttcattggaagacgtccaagtgatggtggatccgtacttcgagccggtggaaatcagcggcagattctcggtggtcgcctcgttgacggcagaaatcgcggaatccagatcgaattggaccacggtcgccggatccaacggcttgacggtgacgtcaacgcttgcggaaacgccgccggccttcgtagtcgccgtgattgtggtggttccttctccgacagccgtgacggtgccgtcgctgccgacggtggcgacggaagtcttcgacgactcccatgtcacatcggtgctgatggcgttttcaggagaaaccgtggccgttagcttcgtagcgctgttttcaaccatggtcagtgcaccgtcaagcacgccatcgccaacgatcgtcacgctgcttggcaacgtgacgtccgcaccttgatagatcttgatgtcatcgatcgcgccactccaataagcgtcgccgctatacagggatttgccgatggttgcggcggtgctgcccagatcggccatggtgatgccggtgtttgccttgtatccgacaagttcgccgtcacgaagcatggtgagggtttcgccgtcgacgatcagcttgtagttgtgccagatattgtcattgttagacagcgaagtcttaaatccttgctcattgttccacttgttatcggaaatgacgaacttcgtggacttggtgctcaggtaccagaacaggtatttctgctggcttccacccacagagaagctgaaatagttgccgtcatcagcatgacgtgatttggcagcgaattccatggtgaacgagttgcccgccttggcgaacagctcatccgggaacgaagcatactggccattgcctcgcagagacaacgcctggttattgttcctgtcgccgaacgcttcgaccttcgcaccgccgttcatggtcaggttgtacccgttgccggatgtgtcagtcgcagttccgtcggaaaaatcatagctggcaagcaggttcagaccgcttgaagcagagggggttgccgaaccgttaccggttccggcgccgtcttcagcgaatgcgaccggcgcgaacgaaaccatcatcggtaccgtgaccgcgatggcaagcccacgtctgagaatatcgcgtaatcgttggctatgtcgtttcatgcactctccttgatttaccaccgccgcacacggttacgacatagagtgatagctagcgctctgcttatgcttcattactgcatcaccgttgttcgttctgagtcggcggcgctggtccgtatttattgtttttcttttgcttgtggccgcatggccggaccgtccatgtccaaccacgaaccgcgacgcgccctacaacactgtgaacgttaacggtctatgttctattcaaagctatggtgactttcaccacaatcccagccagtaacaattcaataacaattccagccagcagcccctttgcaacaaagacggcggaagccggacaatccccttaaaagagcctcatcaaggatttatagacccccatacaaagccaaatagcattacaacacccgctgcagcacttgctccaaagcacccataatacacccttttcacagcacctactgttcactggtttcaggggcggtgagttcgcggatgtcggccttttctggcgcgatcatgtttacgggttcgatgattctgctctggtcgacgcgctgcagcttgcgtgcggtgaccagcacgcgcgattccagtgacgaggcgaacgcattgtaggcaccgaccgttttggtgatggcggaccccagcttggtggcgcgatcgcccaacaccgcgaaccgttcatacaattcgcgggacaggtcgaacagcattttcgcgtcatcggtcaggctttgctgctgccacgcgtatgccacggatttcagcaccgcccatagggtaatcggcgaggtcaaagccaccttgcgtgcaaacgcgtcatccatcagcgtcgggtcagtttccaaagccgcctgcagcagggattcgttggggatgaaggcgatcacaaaatcgggggcatcggcgaacgcgttccaataggccttgtcgcccaaggtcttcacatgttcacgcactgccttggcatgcgcatgcagcagctccgactttcgcgtcagctcctcgggcgtggcggtatcgggaatctcgcacgccttctggtagtcggcatacggagccttggcatcgattggaatggttttgccgcccggcatatggatgaccatatccggacgctgcgtatgcccatccacgtcggtgacgaccacctgggtgtcaaaatccacatgttccagcagtcccgcggattccacgatgttcctcagctgcgcctcaccccacgcgccgcgcaccttgttgttgcgcaacgcggacgacagggcgttggtttcgcggtcaagacgagcctgctgctcgccaaggcctttgagctgctcgccaagcgcacccatttcccgcttgcgaccctcttcgatctgcgaaaccttctgctgcagggcgtcaagattcttctgcacgggcgcgagcgcggacaataccttgctctgctcctgcagttttcgctcgttttcggcctgcttgcgttccgcttcggccgcggcccgctcacgctctcgctccactcgttcctgttcggcccgttgggcttgcgcgagctgcgatttgagataggtcaactgttgggccaacccttccgcctgcgtgcggtattgggtcaccgccgtggacaattcgctgatttcctgccgatcagcttcgatctgcgctttcgcctcgttaagatcagcggttttcgcatcacgggccatttcctgccctttggaacggcccgcaaaaaagccggccgcggctccaagcacggccacaaccaccagaagaatcaccacaaacacaggattgtcgaacatatgttctatataacagcatgaccaagacatcttggaagatcaaagttcgcaagacatccatgcccagctgcattatgcttggagccgaaagcatgctcacgaacatgcggcaacgcgagcacgctgaatattcgagaggcattcaagaggcaatccgggggttcggaaacacatgggattcgatttgtttatgacggtggcggcgattgttgcggcggccgtggccacttgggccatcctcaggctattcctaagcgaaaacgatgacatagccccctcccaccaacgcatcaccgatgacaagcccgccaagaatcacaccgaaaatcacaccgaaaatccagacgaggcagccggcgcaacacaccgaagcgacatcgccaagagtctcgccatcgcaaccatactgaccgctcccacattcaccgtaaccatgctgacattcggcggcatcacacttccccactggctgaccaatccatggctgcacgccatcatcgccacgccggtcatgttctactgcgccgcgccgatgcacaatcgcggtatcgccgccctgaaaagccacacgcccaacgcggattcgctgctgtcgctcgccatgaccattgtgtacgtctacagtctgctggcgtgcgtggtgtcgtggattttccccgcggggtcacgcaatcagtatttcgctttcgcaagcatggtcgccgtgctatcgcttgcgatttcgctgatcgcgcaacgccccatggcaaagaaagcatcggaaggcgatattccgaccgcacaatcgcaagaaaagcaagaaatacaatcgcaagaaacgcaagaaacacagcaaagcatggatacgcttatccaggccagcatcacatatgagattcgcacgcgggtaacgcagattaccgcgaccgtgacgatggtcatcgcggtgtggacgttcgctttgtggctgattttcgggcttcagccgaagcttgcgatcgccgtgttgatcggtgcgacggttttgacggtcgcaggcttggttttgcaggcatatgaccgccaaccgtcacggtaaaacggttttcgcaaaagaaaatcgcgcaatcgcacgaaaaatgggcggacccgcatgtgcgcagtccgcccaccgtcaacggttagaccgttttgtgactcggccaatcaacagtcagtcaggccaaaccgatcagccgaatgactccgaccgtcacttagcctctgccgaaaaatcgtcgtcaatctgccccggcgcccacgaggagagctccaaatggtcgccgccggtctgatccacaagcacggtgtcgccgtcgtgcacttcgccggccagcagcatgcgcgccaactggtcgccgacttcggtttgtaccaaacgacgcagcgggcgagcgccatacgccgggtcgtaaccggtgttggcgagccaatcgcgcgccgaatcggtaacatccagcttgatgcggcgatccgccaagcgggccgaaacctgcgccacctgaatgtccacgatgccgccgagctcttcgcgcgtaagcgggtggaacataaccagttcatccaagcggttgatgaattccggcttgaactgcatatgcacggcgtccatcacggccttcttcttggcttcgtcatccagttcggtgttcaccaggaactgcgagccaaggttggaggtcatgatcagaatcgtgttcttgaagtccacggtcctgccctgcccgtcggtcaaacggccgtcgtcgagcacctgcaacagcacgtcgaatacttcaggattggccttttcaacctcatcgaacagcaccaccgaatatgggcggcgacgcacggcttcagtcagctggccaccctcctcatagccgatgtagcctggcgcagcaccgattagacgagacacggaggccttctccatgtactcgctcatgtcaatgcgcaccatggccttttcatcgtcgaacaggaagtcggcgagcgccttggcgagctcggtcttgcccacgccggtcgggccgaggaacaggaacgagccggttgggcggttcgggtcggaaatgcccgcacgcgaacgacgtaccgcatcggaaaccgcttgaatggcttccttctggccgatcacacgtttgccgagatagtcttccatggtcagcagcttctcgttttcgccttgcatgaggcgtccgacgggaatgcccgtccagtcggacacgatttcggccacggagtcggcgtcaacgcggtccggcaccatcggaatatcgccacccaagccaccgtcagcaccgcctgccgcactgttcttggccgccgcctcgttttgttcggcttgcgcgatctccttctggatggccggaatttcgccatagttgatggcggaggatttcgccagatcgccttcgcgttcataccgttcggcttgggtgcgtagttcgtcgagcttcttgcgcaggtcgccgatgcggttgtgcccgttcttttcggcgtcccagcgtgctttcagaccgttgagtttctcgcttttgtcggcgatttccttgttgaggtcgtcgagacgttccttggcgctttcatcaagctcgttttccgctttctgcgcgtcggcatcgtctttcggattgccaagcaggtacgatttttccatcttgagacggtcgacctgacgctgcagttcgtcgatttcctcaggcgaggagtcgagttccatgcgcaggtgcgatgcggcctcgtcaaccagatcgatggctttgtccggcagctgacggccggaaatataccggttcgacagcgtcgccgcggccacgagcgcatcgtctccgatggtcaccttgtggtgggcttcgtatttcggtgcgatgccacgcaggatggcgatggtgtcttccacgctcggctctcctacgaacacctgctggaaacggcgttccaatgccggatccttttcgatgttctcacggtattcgtcgagtgtggtggcaccgatcaggcgcagttcgcctcgcgcgagcatgggtttgagcatgttgcccgcgtccatggatccttcggccgcgcccgcgccgacgatggtatggatctcatcgatgaacgtgatgatctgcccgtctgcgttcttgatttcctgcagcacgctcttcaggcgttcctcgaactcgccacggtatttcgaacctgccaccatggagcccagatcaagcgagatgagcttcttgttttgcagggtggtcggcacatcgccggcgacgatacgctgcgcaaggccttccaccacggcggttttgcccacgccaggctcgccgatcagcaccggattgttcttggtgcggcggctcaggatctggatgactcggcggatttcctgatcgcggccgatcacggggtcgagcttgccttctttcgcggctgccgtcaggtcggtcgaatacttttcgagggctttgtaggagccttcggcgtcgggactggtcactttcgcgcctcctcggatcgttggcacggctttgcgtagcgcgtcggcggtcacgccgtattgttccatgatttgcgcgctctgattcggctttgccgccgcgatggcgatgagcagatgttcggtggatacgtattcgtcgcccatctgctgcatttccttgccggcttgcgcaagtactgcggatagttgcctgctgacttgcggttgcgcggtggtcgatccgctgacgcttggcagcgcgtcctgcgcttggtgcacggcggcgctgatgttctgcgcgttgccgcccgcggcttcgatcagaccgcggatcacgccgttttcctggcgcagcagcgcgtcaagcaggtgcagggtttcgacttgcgcgttgcctgctgccgacgcgttctgtacggcgtcggaaatggcttcctgcgccattgtggtgaacttctgttccatatcatcctccatggttcgcgccgatcgtccgtttttcgcacggtcgcgtcgacgcatatgtcgttgtctgatatgctcaaccgacttcaccaccattctattcccaaaagttgagcctgcaacactcaacttttgttcactaaacgggaaatcgcgaacaacgcagcacaaaggccgtcacccacgaaaggtgacggccttcatatcttcaatatgtcaatcagcaatcggcaatcagccgcgcaccaccacgttgcgcaggctgccgatgccttcgacgtgcacgatcgcctcgtcgcccggatcaagatggccggaagcgttcggcgtgcccgtcagaatcacgtcgcccggcagcagcgtcgtgaagctggaaatcgccgcgatctgctccggaatgccgtgaatcagattcgccgtggtgccggaagccagctcgacatcctcaccgttcagcgtgaaggagatcttcgcgtccttccaatccaaatcgtcgcgggtcacgatccacgggccgagcgggcaggaggtgtcgaagcctttcgcacgcgtccacatcgggtcaagtccctgcaggtcacgcaatgtcacatcgttcacgcaagtgaagccgagcacgtaatccatggcctgttcgaccgtcacgttcttggcgatgcgccccatcaccacggccacttccggctcgaaattcatatcgttcgagtacgacgggatcacgatcggatcgtccgggccgatcaccgacgtgctcggcttggagaagatcaccatgtcttccggagcgtgcttgatgtcggaatggcctgcttcatgcatgaactgcgcgtgcgcctcgtaattcttggccagcccgtataccttcgacgggatcaccggagagagcagacgaacgccatcgccatccaccggaaaacgctcgccggtcggcttcacaccggcaccggccagaggatgcccctcaagcgccacgagatagtccttgccgtcgctttcgtcggtctgcacgaaagcgtattgcggtacatcattatgcgaaaaacgtgcgattctcatgtctgccagtctacccgcaacaatcgtcgaatcgtccatatcatcgacatgcaacgcccgacaatcaaaaacatcgaaaaaaaaaacgggccatcacatcatgcgaaggcccgtcacaggaagaaaacgtcagataaaagcacgctcgccgaaaatcgcggtgccgacgcgcacgatggtggatccttccgcaaccgcaagttccatgtcgccggtcatgcccatcgacagttcgcggcaggattgcgtgcccggctcgccggattcgagaatatggtcgcgggttttgcgcaggtgctcgaatcccttgcggatggcggtttcgtcgtcgacatgcgcgccgatggtcatcagcccctgcaattcaagtccgtccaatgtaccgattttttgcgcgatgcggatggcatgcgagggatcgcagccggatttcgacgcctcacccgattcgttgacttccagcagcacgcccacggtgatgccgcgcgccacggccctgcgtgagattttctccgccaagtcaagggaatcaaccgattcgatggtgttgacgaccggcagcactttgccgatcttattgctttgcagctggccgatcagatggaacggaatatgctcacccgcaatagtggaagcgccggcatcgtcggcaacgcccaacgcgaatccgcgctccccgcaacgtgccatcaatccttcggccttcgccatcacttcctgcggacgattctcgccgatcatacgcacgccagcgtcgatcgcagccatgatctcacctacgtcgcgcgttttcgtggcggcaagcaggcgtacggaacctgcgtcacgcccggcatgctgctccgccgatgcgatgcggtccagcacacggtgcacgccatcggcgatctgcacggcacgcacaccgtcgatcacctcattggcaagattcttatggtccatatatgcagtcatgttcagcctcttgcgttcaatcccaactacctctaccagagtaagaagaagcccgtacgacggtctgaagtgaagcgataaagcgaccgatatccgtacgggctaataaaacagacggcagtagaagggggaacttcaaagactccgtccgacagcaactatatgcaagatttactaaacacgcgccgaaaaaacttttttcttcaaaaaaaaattttctcagcgaactcaaattcagccttgcgattcgtctaatttgcgttccaaagcatcaacgcgttccttcaacgcaagcacctgacacgtcagcgatcgaatctgccccaactgcacagtcaccaatcgttccctggtgtcggaagacaaggcgcccgtcgtggaattgcttcttgcggccgccataatatccagatccactttccaacgtgcgatattacgttccacacgcttgcgcccgatgatcgcagggctcaacccagccgacgtgaaaatcgtgctcggccgctcgccatccaaatatcggcgcatgcaactgatctgaaaatcacgcgaatacgtgatccgattttccgtaaccgactcaaccgccggcaacgcacgaagatactcgacctccgtgttactaaactgccttttcgtcatatcgaccccattcatccgacaaaacggaataccattctcgtgctcgtagattaccatcacaaacgaacgcgcccgaacggcatatactaccactttaacgtaaggctatgggggctcacgccacctgaatcgccctacgctaaacctagctaaaccccaacgggtacagttgcgtactgccacagtcaacccaccaaaggagcagccatgaccggccgattcgcaccaaccccatcaggacgcatgcacatcggcaacgtttacgccatgctcggagcatggctttccgcccgcaaatcgggtgattccatacggctgcgcatcgaagacatcgacgagccacgagtggttcccggcgccgccgaaaccatgatgcgcgatctcgaatggcttggtctcggttgggatgacgaaccggtattccagtcgtcgcgacacgccctataccaggaagcgcttgagcttctcagcaagctgagctttgacgaaatcagcgatattatcagtactggttccaacgattccaagccctgcagcactacagcaggcaacgaagcagccacctctgaggcaacaccgctcatctacccctgcttctgctcgcgcgccgacatccgcgccgcctctgcgccacaggaaggcgatcgtttcaccgtgtacccaggaacatgccgacgcctcatcgccagcgaaccgcagcgtgcgaaacaacgcctcgccaacaacgaccgccactcgatgcgcatcgccaccgccgacaccaccatcaccttccacgacgaagtattcggcacccagcaatacaacctcgcccacgacatcggcgacatcatcgtgcgccgctcggacggcatctactcctaccagctggccgtcaccgtggacgacctcgacatgggcatcaccgacattgtgcgcggccgtgatctgcttcgctccaacgctttgcaaatctacattcgcaaagcccttatcaacgcgggattcaagccttccgaaccgacacagcccttccatcctgccgacggttccaataaacctgacgatgtgaccatctcatacgcgcatctgcccctcatcgacaacgcagccggccaacgccttgccaaacgcgagcgctcgctcgatctcggcatactcacggcacacggcgccaccgcgcaacagatcatcggctattgcgcatggctgctcggattgcagggagacctgaaacacaccaaaccgcagcctatgagcgccgacgaagcgcttggcgtattcagttgggatgccgttcgcaccaacacgtcagaccgcacgctcgatcaaggcgagttcaacgcatatttcggactgtaggccctattctgcagttttattctgcagctctattccgcaatcgcgttcagccaatccataattccgaatcaagcggatattcgttgatcgcacagccatccaaaaatatggactgctcctgcataagcggtgccgcttggccagccccgcgcacgtcatctcattgtcgatatgccccaaccggtgcccgacctcatgattgatcaccatcgtgcgatatcgcgccaagtcgccgcctcccgacatccacacgtccgtgccggaattccaacgatcatcgttgataatcacattgttgcccacacggcagctgtattgctccgaacataccgacgagaacgtcggcaaggtcgacgcttgggcgagcacgatattgaaatcgcaattgccgtccgtagaaggttcgaaaatcgcgcctgcgcgcccatccatgttcgctgttcagaatacgaaacacggcattcgaaaaatcttcgactgatccgacttcaccattggtgaccacacagtaatgatattgcaccatgccatatccgctgttttgcgccgtttgctgcgctttcgcaagtatttcgcttttctgatcgtccatcagcgcggccgactgctcgcgaagcgctttggtgacggcgtcttcctgcggttccgccgtttcctccgctgaggcctttgcgtctttcgtttccgacgattcctaggttttcttctctgattgttgcgatttcttttcggatttcgcggattgatccgttttttctgaatgtgttccggaattgccgatctgcgccgttttcgcatgtccgttcagtaccgcgttgaccagcacggcatgcacgctgcacgacgtacatgacacgatgacgcataatgcaagaatccaagccacgacgcttctgcggatgcggaacgcttccgtccgttcccggcggctcatggtggcggccgctttcggatcgagcgcacgcagaatggtacgaattcgcttcaatccggcctccttataaccctgccgtcacgcaggtggcagcatatctcttccgcggcaacactaccagccaacagtaggcatgcaaaaagcccgcttcccccgtaccggaaattttccgaggaaaacaggctttatgcaacagttctcatatatcaaacgcaacttatgcgacggtcaggcaaacaagtcacgaatgattgaatgcgatcaggcgaacaacttgaacacgaacgcacccacgatagcgcccagaatcggggcgacaaccggaatccaagcctcgccccagcgggaggagcccttggacgggatcggcaggatggcgtgcagcagtcgcggcatgagatcacgggccgggttcaggccaggaccggtcgggccgcccatggaagtcacgagaccccacacaatgaagccgaccacgatggaagcggcagcgtggtccgcttcgccccacggcatggacaggcagcacagggcgccgaacacgagcacgagggtgccgaagaactcgttgacgaagtagttgatgcggtcgttgtgggcgtcggtggtgcagaaggtgccgaggatggcgttggcgttttcggtgtccttatagtgcgggtagtaggtgatgtacaccacgagctgacctgcggcggcaccaagcagctgggcgatgatgtacggcagcacgaggctccagtcgaacaggccgttcacagcctgggcgatggtcatggccgggttgatgtgcgcgccggagacggcaccgaacatgagcaccgggatcatcacgccgaagccgtagcccatggcgatgttcagccagcccgcatggtgacccttggtgttcttcagttcaacgttcgcgacagcgccgttgccgaagatcatcagaatggcggtaccgaagaattcggccgcaagtttgacaaaagtcgagtattccactgctgtttcctctattgcttcttctcaataagaatcagattgatgtcgattccgctctcggcggacaacagcgtccaacattactccccgcactggaagtcagtatgccactaggtatgacgtcatagcgctggtttcatatgttggatattgcactcgtagtttgattcggcaaaccgcggtttcgccagttccaccattatcgtcagtactgccgaccgctgggcagcgtcacatcgaattcggaattatacgattgcgtttcgttgatatggtatgtggatccgccttggctgacccaagtaccgccgaattgttcggctttgtcgtcacctgcggatttcatgctgccggtccacgtaccgccagtctgcatagtcatctgcatttcggtaatggtcagacctgccgccttggcagagaatccccatgtgccaatgagattgcctttcgcagccttcttcggtgtggtcagcgtggccacaaccatggtgctggctttatctatagatgatgaatccactccgaagaactctgcaataccgatgtcttcgccatccctgtagaaatgaagattagagatgtcgtactgcgcgttggagcctgtcgacctgcccttgccaagagtgcccacgatcttgtcttctgcaatcagagtaatacgtcattattctcagacaaagaagcaaatcgatgatcggaccgcacgtgggcctttgagcatatcggaaccaaagttattgtctataccctcggaagttattaccagggtggacgcgccggggggattgaacctggaacgcgtgtcttcatggagtgatgaggcgtcggccggcatgcgggaaccatagtgagtccgtcgcgggaagccagtagggccggtgcgtaagtccatccacgggaattcatcgcaaaaccatttccttagcatcccatttcctccacccgctggatgttttgcccgctggaaggcttgctttccgggtaaattcccccagtcactggaggaatcaggactccgaagcgtgcgccagcgggtagatttccccaccggctggaagaatcaggacgctgagacgccagtcgatgggtggattcctccaccgactggatgtttcgccccgctgaaaggcttgctttccgggtaaattcccccagtcactggaggaatcaagatgctgaagcgtgcgccagcgggaagcttcctccaccgactggatgtttcgcccgctgaaaggcccacttccgggaagatctctccaccgattggatgttttcggactctgggatgcttacaaacgggaagattcctccactgactggaggaatcaggacgctggagaaccttgccgatagtacggatgcggagtacgaggaggataggcccgagaaacagtttctacgcgaactgcagtggatgtgggagtagacatgcgagcatcagaaaacaaaaaaaccttggaaccggagttccaaggttttgtctgtgccccctcagggattcgaaccctggacacgctgattaagagtcagctgctctaaccaactgagctaaaggggcgttggtcttgcgaggttttgttctcgctgagcacgagaagtaaatatactcagaatcgagaagaacgcaactctcggcgtgtcgcaattgtagaaccgctatttttcaacgatttcagcatattgcataaattacagaaaaatgcgatccagccatcatgttccctatctaaacagcacagccaaggcaggaaatcacaatttcttcacaactgtcgttccgcgtaatccaatcaccccaaacacttccgccaattcatttcgctaatttatttgcacggccatgcaatcattctccccgaatccattgtccgaacaccatgcacgcgcatcagccaccgaaccgaactcctccccggaaagaagcacgtaataatcggcctcatgcccataccgcgtgtagtagctgtaatccgcggcccacgccaacaccgccttcggccatgaagcgcgcaatgtaagatactgcgcgtaaatatcgcggtattgctgggttttgccgtcgacttccataccgtatttacgactgaacagctgcgttgtcggaatgtcgtacagtccggaaaccgccgaccggtcatgagacagctgccagctcaacgccagctgcgcatagcgttccgcatcggagtcggcaatgttcgcaccaccccttgcgtctcccacactcgcaaccgcattaccgttcggcgtcgcacccttctgcaccaccatgctggtcgacttggtttcgatctggtcggacgcacgccagtactgccctatcgcgtacgccagctcgagcgtcgctttgccgcttgtgaactgcatcggatcggatgcgaagtcgtacaccgcggacgcgatcacctcattgctggaatccttgatggagattttgatgccctcgcctttccacgcggtgtcaccgcaggcgtgtgcagagaacgcgacggtcgcaatcatcgtggttccgtttttctcgacactctccaagcccgcgtcgggcgttgtcgcgcaatccttggtttgcttggccgcatcgttctgcttggttttgttggattgctcatccgcgttttgcgccgtcgaagaaccgttttgcgccgaatcgtcaccgctattacgattggttgatttccatacaacaaatcccgcgattaacgctatcaccgcaataattacaataattgcgatgatgattggcttcttgcggttcttgcaatcattggcttgcggatcagattgcgttccggactgcatgtctagctgcaggcttgatggcgcgggcatgggaaccggaggatatgcggccgttgccggcggaacatcgatttgagtggtctcagccggctgagcaccttgtgtccccaacggaaaaccgcaggaaccacagaatcgcatatctgcggtgacggtgacgccgcactgcggacacacggaaggaattcccgcagccgcatggccatcctgcaattgcgcggcgccgcactgagggcaaaaccgtccatctccgttccactgaaatccacagcgagcgcactggccggcatactgctgattccgctgctattgcctgccttaccgttcgtactgttttccgtctcttcgttcggtggtgtcacggcttcggtttccgggcaatcctcctacacgctttccctgttcaatgtcgccagcgtcacccaatacgcttgggcactgtggatttgctttgtgcttttcatcattgcaacgatttacattgcgcttcgtgaaacggcccgcaacatgtatgacccgtattatgcgaagtgggagaacacatggaaggctcctgtcgccgtgatggtgttctggcttgtcgcggaattcctgtgcacgaatttccttgccggatacagctcgaatacggtttcgacgatggtgccgatgtggtatttcatcgtcgccggcgtctgggctttcctcgttgaagtgattgcaatgacgtttggtccgacgttggttgcgtcgacgccgggattgtggaagattcttgttggcggtaccgtacagcagactccgcagaacgtcgtcgattacgtcaaggcttgcgatccgcatttcggccaaccgaaggcagccaggaccgcagcttccgcacagaccacgcagaccgcgcgatacaacgcgcagtatgccaatccgtccgcgccggcaacgtcaccagccgcgcagaccgctcctacgcaagcgctgcccgctgttccaatgccaaccacgccaatcccagcgccagccgcttcggttccaccagtaccgcagtcaacggcttcggttcctcccatgccacaatctccggccgacattccgatgccagccgttccacagggtgaaggaaggccactcgacccaaaaactaagaagacgatcctgatcggctgcatcgtcgccggtgcactgatcgtactgggcattgtctatggtgtgctcaattcgaccgtcttcagcgcgaaatccatggcggaaagctatgtgtcggcaatcgccagcggcgattacgacaaggctaacgacattgccgatcctcaagtgggtaaaaaccaacgaaagctgctttccaacagcgtcgccaagaccgataacgcgaccatttcgaatgcgcatgtcaatggcgtgaaatccggcaatggcacaaccaccgcatcaatcagctactcgttgaacggcgaaaccgtcgatgaggaactcacgatgcgcagatccggcaacaaattcctgattttcccgaactggcaaatcaccacgccattgatcaagtccatcaatgtttccgtgccaagcagtgtggaatcgttgacggtcaacaaggttgcggtcacagccaaaaacgcggagaagacggattccggcgaatggcagttgcgcgtatacccgggcacgtacaacatttccgttacgagcacggattatatcgtcagcgaaacagtggtattccgcacgaacgaagacagtgattcgccgaccacgctgaaggtgacgaccaccagcaagttcaaggatgcattaagcaccgctgtgaacaacgcgctcgacaagtgcgcggaatccaccgactatgcgccggaaaactgcccgttcggcttccgcgtatgggatgaggataattaccgtaatttcgcgtggtcgatcagcatctatccgaaaatcgacgaagtcgaccttgattatggcgcttttgatactaaaaccggtaaggcaaagtgcacatacgaggtgaaagacggcgattcttgggatccggatgatgatagtacgacgttcaatgcgagcggatcgttcgctatcaaggatggtaaggtcacggtcacgcttgatgacggtggctacagctattaaataaagtatgaaaatccccctgcatagctgttttcagctggtgcagggggattttccatgcttaagctcagacgtatctcagtctgaagtcattcgccgtaaccgcaatgaatgcagccatagcgaatggggccgaatcactcagcgacaaccttcacggtgaaggaagcggagatttccgggtgcagagcgacggtcgcagcgaactcgccggtggtcttgatcggatccacggtgatgttcttcggattgacggcagccttggaagacagcgcgatggcgatcttgtcggcggagatgccaccgaacagcttgccggactcggagaccttggcggcgatttcgacgacggaaccctcgatgagttccttggcggcaacagcctcttcgcgggtggcgacggccttggccagacgagcgcgcttcatggcctcgatctgggcggcagcgttcttggaccatgcgaagcccagaccctgcggaatcaggtagttgcgagcgtagccggccttaacggacacgacgtcgcccgggtgacccaggtgattgacggacttggtgagaataaccttagtttcagccatttttcaaacctctctaagatcagcgaccggaagtggcgtatggcagcagagccatctcgcgggcgttcttgatagccttggagatttcgcgctgttcctgcacggaaacaccggtgatacgacgggaacgaatcttgccgcgatcggaaatgaacttgcgcagcagggcaacgtccttgtaatcgatctcggtgaccttggcggccttcagtggattcggcttcttcttaaacggcttgaccggcggctgcggcctcttgcgtgacatcttgatgttctccttaaaatctggaaatcgcttttcttgtaagctgctttaagctgcgatccgagtcggatcagaattccggttcgtcgctgtttccgccgaactcggaggaaccgaacgaaccaaacgaggaggaaccggagttatccgagttgccccacggatccgatgcaggagcgggctgcatggcgggcgcggcattggctggagcggaagccccaccctgatagcctgcgccaccggaatatccggcaccgccctgatagccaccggcattgccggcgaagccaccattgttgaatccgccattgccaccagcgaaattgttgccgccgcgattgccggcaaaattaccaccgttggcactggaggttcgggtgacctgggcggtcgcatagcgcagggacgggccgatctcatcgacctgaagctcgacgaccgtgcgctgggaaccatcgttcgcctggtaggaacgctgctgcaaacggccttgcgcgatcacgcgcatgcccttgcttaggctctgcgcgcaatgttcggccatgtcgcgccacgcggagcagcgcatgaacaaggcctgaccatcttcaaactggcccgtattacggttccagttgcgcggagtggaggcaatggtgaagctggccacggatgcaccgttgccaacctgacggatttcgggatcagcggtgaggttgcccaccacagtgataatcgtttcgcctgccatcgttacctacctactttgcagcttgaaaagcttggaattacttacttgcgaagaatcttcgtacggatgacggattcgttcaggttcagcagacgatcgagttcgtcgctggtggccggatcagcggagtagttgaccacaacgtaattgccttcggtcttgccggcgatctcgtaggcaagcttgcgacggccccagatgtcgatgttctcgacagcaccgccttccttggtgacagtttccagatactgctcggtcagcttcttcagaccacgctcatccagctcaggatcggcaatgaacatcagttcgtacttatgcgcagacatcacccacctccttcggactatcggccatggaccttccatggcaggagtgtgtatgcgtactgccttcacgcatctatatatgaaaggtataaagatacagttcagacaacctgttcagcatagcccttctgctggacgagcggcaattgcgcacgttctgcaacatcatgcgcacgttctgtggtgcaggcgcgtcatgggcacccgcattgttatattgaatacggctatttttgtacggttggtaccgtatttacgcgactctagatttgtggaaggcgaagcatgtcggcgattctcgaaggcaccccggataagaaattggctttggtgacgggtcgtgcgtaccctgagcaggcccatgaaaccgcgaaatacctaggaatcgacgtacttgaaaccacggcttacgatttcgccaacggcgagatgtatgtgcgttacaccgagccggtgcgtggcgccgatgcgttcgtgatgcaggcgcacaccgagccgatcaacaagtggattatggagcagctcattatggttgacgccatgaagcgcgcttccgcccgttccattaccgtggtcgcgccgttccttggctattcgcgccaggataagaagcatcagggccgcgagcccatcaccgcccgactgattttcgacctgttccgcgcagccggcgccgaccgtattatgacggtcgatctgcatgccgcccaggagcagggtttcttcgatggaccggtcgaccatctcaccgccactccggtgctgcttgactacgtgcgcaacaacatgccgcttgagaacaccaccatcgtgtctccggatgccggccgcatcaaggtttccgaacagtgggccgcgaagctgggcaatctgccgctcgcgttcattcacaagacccgtgacaccacccgcccgaaccatgccgaagcgcatggcattatcggcgaggtcgaaggtcacgactgcgtggtggtcgacgacatgatcgacaccgcgggcaccatctgcgaggccgtgcgcacactgaacaacgctggtgcgaagtccgtgacgctggttgccacgcatggcctgctgtccggcccggccgtggaacgcctgaggaattgcggtgccaaggaaatcgtgctcaccgacaccgtgcccgttccggaagagaagcgcttgccgaacatgaccgtgctgtccgtggctccgctgttggccgccggcatccgttccgtgttcgaatccggatccgtttccacgctgctcaacggtctgcccgaagacatgcgtccccgcaatatctacgcctgattcgcgcaatcttttcaacgtaacaaaaactcgcccccatccggtcggcgagttttttaatgtcagatcttcccaaaaacggggtgccgcatcctacgtcggtaggatgcggcaccccgcgtatcaagagagaaaagagaaatctggctagcgtccgataggcatcctcgcttccgttatttggcgaatgcttcgcggatttgcgcggcattgccgtaggaggcctgcgcaccataccctgtggcggcgtatgccgaaacatacgaggcaagctcggccgcttcggaaagcgccatgcccgaggcaagaccggctagcaccgtgcccatgaaggagtcgccgcagccggtggtgtccaccgcgttcacacgcacgggggcaatgcgctggatcggcgttgccgaagtggaatccaataccacggaaccatcgccgccgagcgtcacgatcgcctgttcgaaaccgaatccacgcattgcttccagcgcatgattccaatcgaaaccgtcccaatcgtcgttttccggctcgtcaatgccgagcagctgcaccatctcatgctcgttgacgagcagaatatcggatgcttcaaccagttcggccggcagcgacggggtgaacggcgaatcgttgagcagcactttcacgcccgcttcatggcacatgcgcgcggcggccgtcaccgtttcgatcgggctttccaagcacaggccaagtacggaagaccgtgccagcgcatcgcgcacggattccacataatccacggtgacctgcgcgttggatcccggcgagtacacgatggtgttttcgccggttgcgtccacggtaatcacggttgtgccggatggtccgagcacgcggcgaacatgcgtggtgttcacgcccgcctcgcccagagcgccgagtaggaagtcggcgttggaatcggagccgaccgcgccgaacatctgcacggttgcgccgatgcgcgctgcggcggccgcctggttgccggattttccgcccggcagcagctgcagcggaccgccggtgatggtctcccccggccctggcagacgctgtgcggtgacggtgtagtccgcgttcatcgagccgattacggacactgtgccgtggatgcggtccaatgcggagagaacttcagtcgcgctcatctttaccttccttacatcaaaagaagatttatgaaaatggagatttgcgaaatagtgttgttcagtaatcgcaattatcgcaaatctccattgttattatatcgaggatgttatgtgcgattacttagcagattcctcggtttccagcgcatggttgccttcgtagatcttcttcttgaagacgaagaacacgatcaggccaagcagtgcggtaccggcggcgatcagcagcaggttggaatagttggcggcgtcaccggtagcaccggtgatggaaccgcctgcgagggcgttggagccgagcaggctgccgatgatggcaatgccgatggacggagacacgttcatagccagatcgttcatgccgacgccacgaccagattcgtccttctcaatggtgccgagcacggtggaaacgactggagagtacataaggccacagcccgcgtagaacacgcatgcgcacagggtcagcaccacaaaaccggagttcacgcagaatgccgcgccggtccatcccaggaacatgagggtgcctgcggtcacgatgccggccttgatgccgatcttgcggatgatcatgccggagcaggtgcccaccacggcggcgaccacgaaggcccacacaatgtgcagggaaacctgagtggtggtcatgccgtagatgttggtgccgatggcgttgaagatcgggctcagtgcgtagttcacgaagtagaacacgaggatcaggcagatggcgcgcagccagcgggtgttcttgaagaacgccggggtgatgaacgggttggaggccttgttgatgtagaaggcgaatgccacgaacagcagcagggagaccgcgagcatccaccatgccatgtacgagaagaacagggtgaggaatgcggtggcgaagccgaagatcacgaagccgaatgcgtcaaccttctggccattgccgctcttggacggcagggtcttgagcaggatcggcaggaacaggatggtgacggacgggatcaggaacaggaactgccatgcgatggagctgagcatgccggctgcgaatacgccgatggaagcggaaagctggtatgcggcggtgaacaggccgaagaagatgaccttcaaatcgttacgcaagtacttagtggccaccaccaggaaggcggaacctgccacctgttcgcctgcggtctgcagcacgcgtgcgatgatcacggtccacaggtttgcggcgaagaagtagtttgccacgaaaccgaagagggagccgatgaacagcgtcacgagaccgacggtcacaagcttacgcagggagacgaaatcgcccagggaaccgtagatgaagcacacgatgccgagcacgatgctggggaatgcggtgatcagggacgcctggttcggtgcgccgacgtcggcgccgacctgctggaacaccaggttgaagccctgcaggcacagggtgccgagcacgaaggtgatcagcagcgggatcagggcgcggatggccatcttgttgctggtcaccggatcatcgaacggatcggcggatgcggtgccggtcacggcggttgtgttgttagacataataaaaatccttgattctctcgaattgcgcgatatgcgatacgcgattgcttggccggttacgcttattcagccttggctgcgaggccggagatgcgggtcatgaattcattcaggaagcgcggcacgtcgacgccgacggcaaccttcatggtcttggccgggtcattcaggcgggtttcgtcgccgatggtgcgtccgcgggtcgggccttccacgtcgaccttcatattgatgtcgagggtggtgacgagggtcgggtccactgccacgccaacggcgagcggatcgtgcaggccgcagccgcccagatgcggggacgtggtttcgtaagccttgatgtagaagtcggtcatgtcggccaggaacttgccggccttggtgccgaggtcgcgccactgctgggtttccttgtaggtgagcagggtctgcagggttacgtcgagaccgatcatagtggtcggagcgccggaacggaacaggtagtcggcggcttccggatcctgcgaaatgttggcttccatgcaggcgttgcagttgccgggtacggtcagtgcgccgcccataagcacgatctggccgatttcatccttgatttccggtgctttcttcagtgcggcttcgatgttggtcatcgggccggtcggcacgtagacgagatccttgccataagtcttcactgcgtcgatgatgaagtcgaccgcagattcggtttcgacggaacggctggaatcggggatttccacatcgccgatgccgttgtcgccgtggatgaacgcggagatcggcagtacttcgaagtgatcggtggtgctggagtgcggcaaaccctgatacaccttgacttccgggtggccgagcaggtcggtcacggccagtgcgttgcgcacaccctgctcgacgagcacgttgccgtaggtgccggtgatgccgatcagttcaatctccgggcttcccagggcatacgaaatggcaagcgcgtcatcaacgccggtatcaagatcaagaatcatctttttcatgtgtgtgcctttcctctttgacggcctgacgacggtccgccaccatacgggtgcgtcgtcagttatacatcgagcgcattctcgattgtgttgtgttgacaagatttatgataaagcgttttatcaagaacgcaaattcttcacctacacacggcgtgttgcctgtattcccaacgattacagcatattggagatgcttacgtcaccacataccgagattgatctgcaccacccgttttgcaccagtctgcagcatctaaaaatggcggtttacgcgcaggccgcctgcaccagtttcggcgtaagcacttcaacctgcggatcggaaagccacggacgggcatcccctgattccgtaccggacttggcacgaaccgcaacatcaatccgcttacgcaacataccccaacaagcggcggccaaatcagtcacgctctgctcaacggtggtcatacgccaaccaagaccgaatcgtttgagaatattgtcgtaaccaatcacctgcatatcctcagtaacatgcaacccacgctccgccatacgctgacggaagccaagcgccatcacatcgttgcagcagaacacggccgtcgccccgccatcgatgatctgattcgcggcacgatagccgctatcgaaacggtaatcaccctcaacacacagcgaagaatcaaaatgcttccccgactgctcgatggcatccacaaaaccacgacgacgctccgcggcactcgactccgcaatatcgccggtgacaatgccaatacgagtatgaccaccttccaacagatactgggcagccaaacgaccaccaagatagttgtcaaaaccgacggcatcgcaccagccgcactgcgtcaaacggtcgatcagcaccaccgggcacgacacaagcgccacatcctcacacagctgctcaacagcactcccaacacacgactcacgcgccgggatcaacatcaccccatccaccccacgggcaggaagacgctgcaacaactcatgctccgcagcacgcgaatcatcggaattggccacaatcagcgaatacccctgcgcggcgcactcatcctccacacacttggcaagcgccgcgaaaaacaagttctcaatatcaggcacgatcagcgcaaccagctgggactgcttggtcaccaagctacgcgcgctctgattcggcacataattcagcttcttcgccgcgtcggcaatggccttacgcttctcctcagacacgcgagccggccgattattcaacaccagcgaaaccgtcgtcacagacacccccgcagcagcggccacatccttcaacgtcgcacgatacgccattcaaaccccttaaaacgtttctccttccagcataaatgccacgcactcctgacgcgcccagcacccccatccacaaacaaattcctttcatagcaaaataatccacattatttccagtggtaaatcgtttctcagaaatgtttttgtatactcgcaacgttttgcttaatacgaaagccacagagaagagaggaaccccaatgcaaccaacagcacagaaaaacaatgcgaaacagcgcaaaaccatcgccatcgtcgccgtgatagcagtggttgccattgcgctcgcagccgttgccatcatcacagtcgccaataagcgcgaaatgacgcaagccgccagcgacacctgcacgttgaacgcgaaggcgctcgccacgcatcagcaaaacttcgaagaggctcagaaagaagccgaagatgcggcaaaactcaccgtggacgacgtggccgacggcaccacgctggaaaccctgaaggatgcgatcacgctggccgaagccgtggaaaacgcgccaacatgccccgcgaacggcaatgccagcgacttcaccaaggcgacagacgatattcgcacgtacgccgacaacctgcgcaacatcaccaacgaactcgacgcggccgccaagtcggtgatcgccagccaggaactcaaactcgagtccgccgagtaagtcaggtaagccgccccgacggttagcgccgacgtcagcgccaaaccctacgtttaacggggccaaagtcatccaagtctgcaacttcgcccccattacaagcgctttcgcatcgtatctggcttatatatggcagattcggaaggtcgcccggagacatttcgcttatatatggcaggtcattccggaaagaccgcagttagagggtacaaaattaccccctaactagcttgtttcaaaaacagactgccatacataggcgaaatgcctccgtacaaaccccaaaatctgccacacagaagcgagataccatctgccgactttcctttattttgcattatgcgtgcatttgacatagaatacacattaattgcacgcaagattagggcaggtgatttagatgggcaatattaccattcgcatgaacgacgatctgaaagctcgggtcaaccagacactcgacgccataggcatgaatttcaacacttacgtgaccatggcgagcatccagctcgtgaaccagcagcgcctgcctttcgacacttccgcgcgcgccgcggaaccaaacgagcagaccaagcgcgccatgctcgaagccgaagccaaggaacgcggtatcctcccagacgacgcggccaccttcaacagcgcgcaagacgccatcgcctggctgcacaacaatcacggctgaacaggcaaagcgccatgattaccattaaattcgaccaacaatttcagaccgacttcaaacgcatctcacgacggatacctcaaatcgtaacggaactcgaatatgtaatcgaagctattgaggagtacgggcacgttccggaatcatataatcctcacatgcttgatcacccacgaggaatctactcgggatatgcggaattccatcttgccgaagggaaaatggatgtgttggtgatctactcggagcggccggaagcgtcgacaatccgattcattcgcatgggatcccacgacgaactgtttgacggtccgttgctttagatgagaccatcgtaggacccaacgagattcagccatcgatttccgcccaataaaactttttcccaccatatcgggcttatatatggcagattcgacagcccgacttgaggtttttcgcttatatatggcaggtcattccggaaagaccgcagttagagggtacaaaattaccccctaactagcttgtttcaaaaacagactgccatacataggcgaaatgcctccgtacaaaccccaaaatctgccacacataagcgagatatgcccatgaattacgcatctatgctgtgcaggcgcgacctcgcgtcgcttagaggcttgacaacaccttccatttgacaaaagttgtcagttgccacgcaccaggagacgcaataggggaccgcaccttcgaggtgcggccgttttcatccttcaccaaacctggatctgcaactaaggctagcgaacaaaatgtacgccaaaccacacatccattccccggcgaggttgactcgcctgcaacgcgtctcctcgatcaccgcttaccgaacttcaattgtccggcctgcgccacacgaaccgaattcttactggccttgggcgcggtagcgggcttcggtggcggctttggcgggctcccaccaggcgcggttgtccgtataccaagcgatggtcgcttgcaaaccggcttcgaaatcagtgcgcacgggccgccagccgagttcggtacgcagcttactagagtcgatcgcataacgccgatcatgcccgggacggtcacgcatccagtcgaacgcatcttcggcacatcccataagtcgcagaatcatacgcattacagcaatgttgctcatttcgccgtccgcgccaatcaggtacgtttcgccgattcgcccgcgcgtcagaatctcccacaccgcggaagagtggtcttccgtatgaatccagtcgcgcacgttctcaccagtgccatacagtttcggccgcacaccctccatgatggatgtgacctgccgcggaatgaacttttccacatgctggtatggcccataattgttggaacagttggaaatcgtggcgcgtagaccgtacgtgcgcacccatgcgcgcaccagctggtcggatgccgctttcgacgcactgtacggactcgacggcttgtatggcgtactttcggtgaatttgcgtggatcgtcgagtgcaaggtcgccgtacacttcgtcggtgctgatatggtggaatcgcacgtcatgcttgcgggcggcttcaagcaaatggaacgtcccctccacatttgttgtaatgaagggttcaggattggcaatggaattgtcgttgtgtgattcggctgcgaaatgcacgatcgcatcatgatccggtacgatacgttccagtaatgcaacatcgcaaatgtcgccttgcacgagttctacttgtgactgcgggagaccggcgatattttgcggatttcctgcatatgtcagcttgtcgagcacggttatgtgcacgtcaggatggttacgtaccacatagcgcacgaaattggctccgataaacccacatccgccggtcacgatgatgttgcgcggcttgaaaatctcactactcacgatttcagggtaccggcagggttgcatcatggagcgctcgtgggcgatgtctcgaatcactaattcacgtaacccgcgcaagccgaaaagttcaatggttgcacggcttcccccgtggcggatgcgatatctatgacagattcagcaggtttttcgcactccaaaccttgatttggtgtatgaacggcacctcagttacccttgatttggtgtatgagagcgcctttcgcaacccttgatttggtgtaaagaccgcataatcattggcttttcaagcagagacccattgaactcaaacgagcaccctaaaatttaggtcctggcagaagagaacttctggattacatggcaagattcgggctctaggccaagtatgagtcaggtcccgcttctgtctccagtgaagccgactcgcttgcagcgtgacatcttcaaaagcgacgcttaccgaatctcagttgtcagactgcgtcacatctccatggcgaactgtcataagcgttcccgtccgacgcacttcacaaattcgtcttcctgaggcttggaacccttatagtcggcaaacaacacttcaaaatccggaacagcaatggtcttcatacgagcacaagttggaacggcatgttcagcagcaatatgtccagaagtcggaatagtgcgttcatggtctgtcatggcaaccacgttacatctcacgtcaacggtctaactgcgccaagccacgcaccgaatccgccgcccgccttctcgtcgccccatacaagccacgctttcggcgcattatcagctggtggcatccaacacttgcgcgcgcatatagtcgtccaccttgaacaccaaatccgtctgtcgactgtcgctcgcagcaaattgagtaaaaagatccacatatcgagcctctcccccagtctgcaaatcaaccaattcctgcgctacgacccttcagatttcgcatacattttgttgccctttcccacttacgttgtaggcagataccccacgtagcacagttaaccttccagctacctttaagacatccgctaggcacccgttcgtccacagctgaacactagaatatatccggtttaattgtacagagcccctaattacaaggggctgctttttggaggatgcgacgatgcccatttactcgcctgaccgtcatacttgtgcaccttcatacgtaaaacttactaagcagccgattacgggcggagcgtatcgccctcttgcgaatgacgaagatagcaacgcttgcgctccatccaccctttcaggtcaccatggttcaaagctgtatacgcagaaatcagcaattcacgccatctccgataacgcaagcgttttcattcccaaaatcgatgcgccccatctgccaaaaacgactgacgacaagtccattgacgaagccattaacgaagctgcgaacaacagtacccattcagttcccccgtctactgaaattcaactcacgcaaactgacaaacatcctctggtgcaggctgttaaagtccgtaagcaaacagtacacaccacagcaaaaacactttccgtcgcagggcacgcagtcgcaaaagctgtcaacgccaccggccacgccatccgcaccgctgtcacagcagtaaaaactgcatggcataccttcgttaacttcaaagcagtacagctcatcatcaaattcttcaagaaggcacacggcctgtggaggaaacgcatgaggttctcctatgcgttctacgccattgtctttctgctgctcaccacagccgaaaccctcttcatgaaatggaccgtaataactgaacctacatacgatcccggaatcaaggtttccaatcataagaagcttgtcgaaggcgcagttgggcagctcactaaatatgtgacaaatatgtggctgactgaccacaatcaccttttcattcttaattttgtcggactagccttaatttatttagttcttatttttgtgcttaacagattctggcttgccacacttgttttcggtgtctccatcacagcctttggagttgccaataaaatcaagatggaagttcggactgaaccgattctccccgccgatttctcttttatttcaggtggcaacacgggaaacatcatgtctttcgtgcctgaagatagacaagcttttgtgaacggcgccgtatcacttgtcacttggttcgcgattatttgcattgcttttttcatattagatcgtcgccgcaaattcatttactgttctttccttcaccccattgcaagtttcaagaatgttatcggaaacctcactcgcatagccgcagcggtcctcagcgtagtccttttggtctcatttacctggaatctcaccgttccggaatcttcagtatatgcatgggcaaaagatcaaggatacaagccacaattatttagcactatttatgacgctcaaactaacggacctacaaccacattcttgagtcttaccaacgtcaaaattatggataagccggaagagtacagtaaagaaactatggcgaaaattgcggatcgttataaatccgcagcccaatctatcaacaacgatcggtccaatcgtctcaccgacagcactgtcatcatgatcctgtctgagtctttctcagatccgctgcgcgcacctcgcgtctcctacagtattgacccaatgcccaacattcgcgcgcttaaagaacagaccacttccggtctgatgctatctcccggatatggcggcggcaccgccaatatcgagtaccaagaaatcacaggaatgagtctctccaatttcagcgattcaatgaccgtcccttatcagcagctcgtgccaaaccagaagaacccatatgctttcaaccagatttggacacaacgttatggcaaggaatccgctagcgcagtacatccatatgctcagaacatgtacctgcgccatgttgattatcaaaaatttggttttgactacctatataccgacgatagtaaggtacgagctccctaccaagaccatatcgacagtaatccgtacatcagcgacagctcggcttatcaggatatcgtcgatctcatcaaagacgataagtcaggaactccgcaattcctgcaactggttaccatgcaaaatcacacgccatacaacgattggtatgaagacaacgagttcaaggaagccaacacttcaacagaactctccggctgggaaagagacaacagcgatacatacgccaagggagtgaattatactgacacggcaacagcagatttcctgaacaaactaaatgagattgatcagcccattactgttgtcttctatggagatcatcttccaggaatttatccaaattcgtttgacgattcaaaccatgatttgccattgcatgagactgactattttatttggtcaaatgccgcatcaccctcgtctggcacaaaattagatccggcgatttcttcatttacttcaccaaattattttatggcactcgctgctgagcatatgaacgctaaagtgactccttaccttgcgttgctcaccggattgtacgaacaggttccggcaataggtagagtgtcattcactaagaagtggaatcaaaaaggcactaccacctatcttgatgccagcggaaacgttatgtcctcagcggacctctccaaagatgcgaaacagcttttgaatgactacaagctggttcaatacgatatgacagcaggaaagaactatcttgcatcaaccgatttcaccaaggaattgtagtcactttaccgttatccagtagccttctacttttccggaataccctctttccagtccaatggaaccatccttgggtatcttcacaatacccaaggcacgattcctgctatcgtgagacgatttaacctcagaatccggcgacatggactttaccgtgatagatccagcattgtcaccgtcaaactgtaacccaagatactcaacagagttcgagttcttcacagtcacctgatcttttgaaagagaaacatcagtgggcgtgatagacaacacttcacgaactccatccactggattcacactgccccatagcaatccgccaaaatagtataggtgaagtgagtcctgatattccattgctttcttatatgaatcaaaaacgtacaaggtttctttttcaaaagccccggaatccatttccgtttctttctgtttcttgtaactttcaatcgcttcagtatcacgacgcgaataataaaaatcatttatcgtaatacctctatctatgatttcttccgcaatatcgtaatacgcttggaacttcagctgtccatcgctgaaaatcatcacatgcttcttcccctcaagcatcgaatctaaatcttccgtcttaatccaagcggaataagtttgctgtctatttttgtacagctcagttcgattctgcaacatcggagaaagatcagaaatctgcaacaacaaacatgtgacagtgaggagcgctgccactttagaggtaaatgtcctatagaccacaacaagtgttgcgatgacaaccaagtcccaaacgccccacatgaaacgccccgtggaacgaaaaatgccataaattttcaggaagaaatccggataaggaatatggagtaatgtgcgatcattcaacgtgatatcagtgccgaaagaagcgactaaaagcaacacgcctgcacaacatatgtagataatctccacacgcagcgcgttccattgctctttaatccactgaccaccttttgcgagaacccccgcgatggctatgatcaacagcaacataagccccagccccagatacgagtagccctcgtattggccaagttccgccacaggcttagtcttcatgaacttagaccaaccggtcaagtacaggccagtttccaaaggattaaagagagcgttcaggttagctccaagatgccctaaaccaccgccattaacgctggtgctaccaatatggtagaaaccaccgtaaatataaaaggccagaatggctccaaccaacgaagccccgaattccgaaacccccaccaataccgtcttcttaaccgcagcgatatagatcgactcaatcaacatcaagatgccaataatcggcacgtaatacatattgactgatatcgccaggaagaaaagcgagccccaaagaacaacatgtttcacaggagatcttctctcactgttagttacaatcagtaaaattcctagcaaaataacccaattcgcggcaagcgcagtgtgtgtatacagtcgctgaatggaaaaagttgtcaacgcaaaaaacactgacgaaagagcagaaaaacagacgctgccggtcagttgaagaataatgcgagctcccactgcaccatttagcacgaagcagcacaaaccccatatcccaaagaactggaatgtcgcgggcaatgcagaactgagtaccttgaaaattacatcaaaaagaggcaccgaatcaatgtacataatcggggtcagactcggatcagcaaccccatccatcaaaccgatcggccaatgccaagcagaagctctatagaacttccatccgtagtatgactgcgcaaaatctccagtggcatttctgatccagtcgtcatatgtgacgtcaagaacggcaacaccatatatccccatgaagaagagtccgccaatgatcgccccaagcagagtagacacgacagacggtcgaacccgcagccctttgagactaaaagccttcatcttttcattaattgaatttcgagcaacgctggtttccatacaacaactctctttgaatcttctcattcatcagtggtttcgctaattaaaacttcgtttcaatgcaatagcgcgggcgacgcttagactcaagatatatcttccccacatactctcctacaatgccgagggacaacatgaggaaacctccaataagccacaatgaacacatcatggatccccaaccaaccaccgcatggttagtgaaaacagacgcaataacgtaaaccagcatcgccaagccaactagaatcgacagaacaccaatggatgtgacaagtttcaaaggcttcgtggaaaaagaggtgatgccctcaatggcgaaggcgatcatctttttcagtgggtatttcgattctccagcctcacgaacgccccgttcgtaatataccttccctgttttaaatcccaaggtcggaacaataccacgtagaaaaagattcacctcgttgtactccgaaagggcttcaagcgacgcacggcccatcaatcggtaatctgcatggttagggaccgtctccgcccccatccacgcgaatattgaatagaacagctccgcggtattacgcttgaaccacgtatctttctccctagacgatctgacaccatagacgatttcacagtggtgctcggaaaactgcttaatcatttcatctgcagcatttacatcatcttgaaggtcggcatccatggagatggcggcatcacatccagccttataagcctccataagaccagcatagagagcattctggtgccctctgttatgagcaagtttcactcccccaaatagagaaccattcatattgtggagtttctcaataagctcccatgtgccatctttcgaaccgtcgtctacaaaaaggattctgctctgctcactgattttcgatgctgcaaccaactgactcgtcttctgatgtagcacttctgcagtatgttccaaaccttcaacttcgttgtagcaaggtaacacaaagtagataattggcaaagattcaacgcccaccgaatccaaaaacttcgcatactcacttgtcatagctagatactctaatagaggctagagtcatcattcatgagcattagttgagaatggatctcaactagtcaaattagtttccggaaaggtctgattcatgaaaatcgcggttgcaggcactggttacgttggattgtctgtcgccttgctgcttgctcagcataatgaggttcatgctttggacattgttccggagaaagttgagcttctaaacaacggcaagagcccgattgtggatgctgtgattactgattttctggagaagaacacctccggagagcgccctcttgacttccatgcgactgttgatccggaagaagcatattccgatgccgatttcgcagtgattgcaacgcctacgaactatgacgagaagaagaattattttgatacttccagtgtggaagctgcgatttccgcagtacgaaagtatgcgccggaagcgtggatcattattaaatctacgattcctgtcggatacacgcagcagctacgcgaccgtttgaacgatgatcatattctgttttccccggaattccttcgtgaaggtcacgctctttttgacaacttgcaccccagccgtattgttgtcggtgctccgcaggatgacgcacgttccgtagaggccgcacgtacttttgtagatcttctggcccaaggagcagcccccgaagaacgctctcgagtcaatcatgatggcagtacaggcattccagaactggtggcgggcactaccgaggccgaagccatcaaactgtttgccaacacgtatcttgcgttgcgtgtggcttatttcaatgagcttgacacttatgctgaaagccgcggactgaacactcgcgaaatcattgacggcgtttgccttgatccgcgcatcggcgacggttacaacaatccaagcttcggatacggcggttactgcctgccaaaggacaccaagcagttgctcgccaactatgaccaggttccgcaaaatttgatcgaggcaattgtggatgctaaccgtacccgtaaagactttatcgccgacgaaattcttgacagggttaaagatattagcaatcctgttgtcggcatctaccgcctgaccatgaaatccggttccgacaacttccgtcagtctgcgattcaaggtgttatgaaacggcttaaggcagagggcgttaccgtggtcgtatatgagccaactctgaacgccgctgacttcttcggtagcgaagtaactcatgcttttgattcgttcgcggagtgtactgacatcatcgtcgccaaccgttggaatgatgcactaagcgaagtgtctaacaaggtctttactcgagatttgttccgtcgagactaaataagattcaattcattcttacttacgtcatatgttttctaagaaaagctccacaagtcaagtcgcacgcttgcatatctccctgctgatcgcaagttttctcatttatttgggaggtcagatatggcaatgtgtatcttggccaccgttttacagctttgacgagactctcgagattgattacgtctaccagctttcgcaggggcatctccctacgttcttcggaggcgctgagttcaatccactggatttacaatatccatacgacgtgcaatggagatatcagcatccaccattgttttatcttgtgcaagttccggcttttcttctggcagacactttacatcatcccatccgtggtatttgggcaatgcgcttcgtcgagacggtacttggcatactggcaattatcgcctcatcatggtcggcacgtaaagtcatcggtaaacctttcgccgtcaccgcaatggtacctgtaatcgttgcgtcaaaccgatgctttccttcggtcgttctcaattacacattggcatcactttgggtcatattgctgattggtatgactgcttcactaatccgtacaacgccgaatggtttcagtagaaaacaactcttcgtatggtcatttcttgttgcattagccccgttgacccgcacttccaccattccaatcatgtgtttatgcggattgatggtgattattcatctcgtgctttccaagtgcagaacacttcgcatctggcttaccagtgtcattcttcctttactactcgccatcgttagttcggtatggttttatattcggctttatcgcctttctggatcatttaccggaacgcaaccggagtggtcaagtacccatttaggacgcaacacccatctgaatttcactcaagctcttttcgataaagatttctacatttcctcttttgcgcaatatcagaattcctctgtaaccggcttgcgctatggatggctgttggtaattgcgttgacatttcttcctctattctttggatttgtggcatgtatcgtcaccctattcaagaaacgtcactttagacaaactttccagtctgacgcatccattttcatcatgcttgtccttgctttggctggaacaaccttccagcagctcttgttcttcaagcaaggaggcaaccctaacgccgtctatttcagtcttatctccatcgtgtttgccttattcatcgcttacggattttcactgtttccacgatggtgggctgcagctctatcgatatggctagcactaagaggatttgcatttgcccttgagatacacattcgctggccgttctcttctgaaggcactatggcaggcgcttcgcaatattgggtatggctcacccttgcaggcatcatcacagtatgtctcggcactttcatagccattatcgcttcggccaaaggaaggaagttctctccattacctctaacagcatttggaatcgcaactgaatagtaagctggtcagtatggctgaagagacgtttactcctaagaacatcatcgtgaccggtggctgtggtttcatcggttcgaatttcgtgcattacgtagtcaacaaccatccggacgtgcatgtgaccgtgctggatgccttgacctatgcgggcaacatcgagaatatcgcgggcctgccggaggatcgtgtcgagttcgtgcacggcaacatctgcgacgccgagctgctcgacaggatcgtgccgggccacgacgcgatcgtgcactacgcggccgagtcccataacgacaattcgatcgcggacccggaaccgttcctgaggacgaacgtggaaggcacgttccgtctgctcgaggccgtgcgcaggtacggcatccgctaccaccacgtgagcacggacgaggtgtacggcgacctcgctttggatgatccggccaggttcacggagtccaccccgtaccatccgtccagcccgtactcgtccacgaaggcggcatcggacatgctggtgcgcgcgtggacccgcacgtacggcatccgcgccacgatctccaactgctcgaacaactacggcccgtaccagcatgtggagaagttcatcccccgccagatcacgaacatcctcgagggcgagaggccgaagctgtacggcaagggcgagaacgtacgcgactggatccacaccgaggaccattccagcggcgtgtggacgatcctgaccaagggcaggatcggcgagacctacctgatcggcgcggacggcgagaggaacaacatcaccgtgcttcgcatgatcctgaagatgatgggacagagcgaggacgcgttcgactgggtgaaggaccgtccgggccacgaccgtcgatacgcgatcgattccacgaagctcaggaccgaactgggttggacgcccacgcacacggacttcgagtccggtctgaaggccaccatcgactggtacacggacaaccgccagtggtgggagcccgccaaggccgccaccgaagccaggtacaagcagcagggccagtaagacgcatacgagaacggtcacaccccaaagggcgtggtcccatgatgattcccatctacggcaaaggatttacgagggtatggatttcgagaaggatttgagggtcgaggagacgaacgttccgggactgctggtgttcgacctgccggtgcacggcgacaaccgcggctggttcaaggagaactggcagcgcgcgaagcagacgaatctgggcctgcctgatttcgggccggtgcagaacaacatcagcttcaacgcgaagaagggcgtgacgcgaggcatccacgcggaaccgtgggacaagtacatctcgatcgcctcgggcagcgtgttcggcgcgtgggtggacctgcgtccgggcgaaagcttcggccaggtgtatacgaccgtgttggatccgtcgaaggcgatctacgtgccgcgtggcgtgggcaacagcttccaggcgttggaggacggcaccgtgtacacgtacctcgtgaacgcgcactggagcctggaacagaagaagacgtacacgttcgtgaacctcgccgacccggatctgggcattcagtggccgatcccgttggaggactccgaacgatccgaggcggacctgcaccaccccatgctgagggacgcgaagccgatggcgccgcgccgcacgatggtcaccggctgcaacgggcagctcggccacgccatccgcgactacgtggaggagcacggcctcgagggcttcgagttcaacgacatcgacacgttcgacttctccgacccggcacagtacgaccaattcgactggagcctgtacggcacggtcatcaacgccggagcgtacaccgcggtcgacaaggccgagaccccggaggggcgcgcgttggcctggaaggcgaacgcgcagggtcccgcccttctggccaaggtcgcgcgcgagcacaacattacgctcgtgcacgtgagctcggactatgtgttcgacgggtcgcgcgaactgcatgacgagtcggaggggttcgccccgttgggcgtgtacgggcagtcgaaggccgcgggcgacatcgcggtcgcgaacgcgcccaggcactacatcctgcgttcgagctgggtgatcggcgagggccgtaatttcgtgaagaccatgatgggcctgtccgaccgggtcgcgaagggcgaattgccggaggtgacggtggtggacgaccagtacgggcgcctcacgttcacttcggatatggccgatgccatcttccatctgttggattccaatgcggggtacggcacgtacaatctgaccggttccggcagggtggaaagctggtccggcattgccaggatggtgttcgaccagacgaacggcaacggcgacagggtacgaccgatcccgaccgaagagtatttcgcgaacgcgaaggatccggtcagcccgcgcccgacccattccgccctggacctcaagaagatcgaagcgaccggataccccgcgctggactgggaggaatcgttaaagaagtacgtcgccaaggaactggccgagtgattcagggggaagaaacctcccgataatgcgatgaaaccgcgtggactcctctgcgcggtttttcaatattggattgacctactaagctggaaacgcttatcaatcagagatacgtcagaaggcaggacgattatgaagggcatcatcctcgcgggtggttcgggcacccgcctgtatccgttgaccacggtcacgtcgaagcagctgctcccagtgtatgacaagccgatgatctactatcctctaagcgtactgatgatggcgggcatccgtgacatcctgatcatcagcacaccgcatgatctgcctaatttcgagcgtttgctgggcgatggaagccagtatggcgtgactttctcctacaaggtccagccgagccccgacgggctcgcgcaggcgttcctgctgggcgaggagttcatcgacggcgagccgtgcgcgctggtattgggcgacaacatcttctacggcaacgggttgggcgccacgctgaggggcgcggtccgcaaggtcgagaacggcgagggcgcgacggtgttcggctattacgtggatgatccggaacgctacggcgtggtcgagttcgacgagaacaggaaggccatctccattgtggaaaagccggagcatccggcttccaactatgcggttaccggtttgtacttctacgacgagcgtgtcaccgaattcgccaagcagatcacgccaagtccccgcggcgagctggagatcacggacctgaaccgcatgtacctagacgaggggcgtctgcacgtgcgcacgctggggcgtggctacgcgtggctggacacgggcacgatggacagcctgttcgaggctggcgagttcgtgcgcaccgtgcagcgtgcgcagggcctgccgatcgcgatcgtggaggagatcgcctacgagaacgggtggatcacgcgcgaacagctgctcgagtccgcgagacggtacggcaagagtccgtacggccagcacctgcggggcatcgcagacggacaaatcatgctcgtaccaaatcaagaacattagtcacgggtagggctttcaatgcggacaccgcattttaaaaccctatctcataatatcgtgaagaaaatagacctagttaaggaaatatctcacatggctctcacaggagaacatcagcatccggatatcaaaatcttcgtgtcggcacacaagcctgctgttttccctgaaggaaacagcatcctccctgtacaggttggagtggcccatgccgcaaggcggttcgacagcacactgcatgacgatgagggtgagaatatttccgataaaaatccccgttactgcgaactgaccgcgcaatactgggcttggaaaaacgaggatgccgactactacggtttctgccactaccgacgctacttcgatttcaccgataccccgcatcaggaaaacgactatggcgaaatcatcgattcctatatcgacggtcaaaccattgaaaagtatggcatcaacgatggcgatatctccaaagcggtagatggatgggacgttatcaccacgccgcttaatgacacccgtcgtattggtgggtttacgaatctcaagcagcattgggatgcggatagacatcttcgcctcaaggatttgcgtcacatgtacgacattctgtgcgcacgtcatcctgattacaaagcggatgctgatgcggtgctgaatggccatactgcagctttctgcaacatgtttatcatgaagaaggatattttcttcgagtacaacgaatggttgttccccctgctggacgagtttgccgagcatactgatttcagcaagatggatgtgcagactactcgcaccgtggggcatctttctgaacgtttgcttaatatttttcttgcacataagcagcgcactggagccaattggaaaatcaagcgactgcagtgcgtgcattttctgcatccggaaccgttcgccaagcttgaaccgttgcaggagaatcctgaaaccattgtgcctgtggtttttgcagcggacgataattacgttccaatgctcactaccacgatatattcgatgctgaagaacgcttccgaagatcgtttttacgatgtgatcgtgctggaacaaaacatttctgacgagaacaagcagattatcacgaaattccttgcgcaattctcgaatgccgccgtacgtttctatgatgtgagccgatatcttgcaggattcaatctcaccaccagcaatgcgcatatcagtgtggaaacgtattatcgtttcatcattcaggaagcgttgcctttctactcaaagctgctgtacttggattgcgatcttgtagtgaatggtgatgttgccgaactgttcgatacggaaatgggcgataatgctatcgccgcagtgccggatatcgacttcatcggcaatctcaatatgaaggatggtattcgcgccgagtatgtgcgcaagcagttgcatatgcgtgacgcctatggatatttccaggctggcgtgctagttatgaatttggatcgcacgcgtaagattcatacggttcatgaatggctgcagattgcctcgaagccgggatatatctacaacgatcaggacattcttaataccgagtgcgaaggtcttgttacctacctcgactattcgtggaatgtgatgcataactgtgctggacgtgtggcgggagtattcgatttcgcacctgcagacgtgtataaggcatacatggaatcgcgcaaggcaccaaaggtcgtacattatgccggtttcgacaagccttggaagaatccttggtgcgatttcgctccactgtattggcagtacgcgcaggaaactccgttcgttgcgcaaatgtacgccgccatgtcaggagtgcagaagccggaacctccggaacatcatgatcgggccattgctgaagacagtccaatccgtaaatatgtggatgttttagcccccaccggatccaagcagcgcgaactcatgaaagtcgtagcgcgcaaagtacaaggaaagaaatagattgcctcattccatgttcatgcggcaagacaaaggagaattatgatggcaatgcgttttcttggactgtgcagaggcgacggcaagggctacgtaaaaatcggaacggacacaaaacctgaattattaatggcaacaataggtatgccagatggttcttgtagacaatgccctatttttcccatcggtttccccggagaggaggtcgctgctcgtacggtatggggagatgcctccacgaaggagtcatacgaggctgtcgtagtagttccccttctagataacgcggacctatcgatctccgttacgaaccgtgagaatgatacagtccttggaacgattcctttcaaaccactaacgacgaagattcgttcacgtttaacgtataagcaccgtcctcaattcgcagcgcaaatccgcgacattgatcaacgcagactctccggaactccgcatgtgtatgtcacaggcatctacccagtggatgagcaacactactcctgccgtttcactgtgcgttatcctcttttccaggagaaaagtaactgctccatatcgatatatgatgcgtcagctaaacagatcgagctcccgacggtggttcttgaagattcagttatctccaatcctagagatcacacgcaaagtttacgtgaaatcgtttattccgtcagcgttacggacacaaataagacactttgcatctacgcgttccccgaaggccaagatgaggctttcacttgtgtattgccaccgatgtttgacggatttgttaatggagccaaagacctgacaaaacatgcttcctacgacgagggctatcagatttggctcgaacagcacagagcaactgaatccgatgtgaaaaatcagaggacactatgtcaggcttggaagagcacagagaagccgctcatcagcgtggttaccgttgtcttccgaccgccggttgaatacttgcgttcccttgttaacagtctgatagcccagtcatacgaacatttcgaggttgttttcgtcaatgtcagcggtaacgatcaagaggctcgggctgttaacgagttccttggcaacatccaagattctcgtttccgtgtgattgacgctgagaataagagcattgcggaaaatacgaatatcggtattcatgagaccaaaggcgaatacatcgcttttattgatcatgacgatgtaattgagcctgacgcattctaccggtatgtttcagttctacacgataagcccaaagcagatgttctatattgcgacgaggatctgcttgataatggcaagtatatttggcctgtatttaagcccaatttcaatcctgacttactctattcgtacaattacgtgacccacatgctgatggtcagtcgtcatgtgctgaatcaggttgaactctctccggccaatgtaagcggagcacaggattatgatttaacactgaaatgctgcgaaaaagcacgtgaagtcagcaatgtaccttacatgctatatcactggcgcatgcatcagaattcgacaagcaccaatccagacagcaagccgtatgcggaaacagccggacaacttgccctcgagcgtcactacgaacgcattggaatcaaagctgaagtatcagaatccgagttaccattccgctaccgcacacgttatctagcggtgaaacagccaaaaattaatatcgttattcccaccaaagaccacattgatctgcttcaacgttgtttagattccgtgcttgcaaagacggaatatggaaattatgacgtaacacttgttgaaaataatagcgtcgagtccaccactttcgccttctatgaagaaatccaaaaaaaagatccgcgcgtgaaagttgtgacttggaatggacaaggctttaattattccagtatttgcaattacggagccgctcaacgcgacggagacattctactattcctgaataacgacactgaaataatcaataacgactggctgacatccatggtggggttcttctcccgcccagaagtaggcatggtcggggctaagttacttttccccgacaacttagtacagcacggcggaatctgggtctctcccgatcgagttggctattacagcgaactcctttcacatagagacggcggttatatggaaacgatgcggtacccttccgattgcgctgcagtgacgggtgcctgccagatggtacgacgcgatgtcttcgagaatgttggtggattcgatgaacaattggccgtcgtgctaaacgacgtggatctctgtctcaaagttcgtgaaagtggatatctcgtggtcttcgacccacaagcaaaacttcatcacagtgagcatgctagtagagggcgcgacgaacaagacgtgtccaaagctcggcgcgctatcgacgagcaagctagattctacgctcgttgggataagagcctaatcgatagcggtttcattaatcctaacctgaatcagtgcaacggtcatttcaaaatcacatggtgattttgaaaaagccaccacattactcgctgcctcccatttttcatgaataacaagaaatgggaggcagtttactgtgtcctgttcagtgcgaaatcacatagaaaaaagaacattcaggaaggttcataagaaccgagtagatgaatccatccactacaagcagaagagcaaaaacggcgcataaagctataccattagttgagagcatcgtcctgtgggcagcccggaaagaagctcgcatagaaatgtcatcagacttatgcagattattctcaataagtttcataattgcataagccaaaagaggcacggcgcataagtaatacctactgctgatgccacctgggtaaccattaacattgaagctcatgaatcccgaattaagcatctgatatgtaaaagttatcactatgcccataactgagatgcgaagataccagacctcctttgatgcgctcacgagaaaaagaataaaaggcattacaagtattgcagtaagagcaatactactgagccccagatgagatgacagtgtggaattctcacgcggcaaataggtatgtccggcaagtgtatcccacgttcccataaatttctggaagaaataacaaagatattcccatacccccatctgtccacgcgaattaatatcgcgatacattccactctgcacaaattcttgttcggcgagagctttgtaattcggttgaattgtatggaatcttttataaaccttccagaagtagataacagatactccatacagggggagcgtaataaagaatcgccaattaataatggacttaatctttttttctttgaagaaagtaaataaaacaattccaagggcaataatgcatacaatcattccagtagtgagcttcgacaacagagacagattaatgccagccgcaatgacaaagtacgtgagtatgttgtacttcttttcatagaaacgaataatacccaacataaaaatcgcaacggcaggtatcgtcaacgcatcattagatacgccactgataacataaatcatattcggagcactgataagaatcaagccataaagcatgtgaagaataggtatcctgcgcaaacgcgtatatcctatataaaacgcaatgaggattccggaaaaacctatcgcaaaagaaagatttctcatcaactgaagatcataaattacctgattaccatcaacgacagaatgggacagtaatcgtagaatgtggtaataaaatggcggatgtccaagataattaaactgcgttggattagcatagtccatcacattattatcaatgttggcgtaaacacgcatacaggagaagtcaggaataattcgctcatacggagcattcttcacaagatagctcatataagatatgtgagccttctcatccgggaagcccccaatgtaactcctatagaacacaggctgcgcacatgcatacagtcccactatcacgtaatcgaaaatgcagacaacagatcggaagcgcttgctcgcagcggagctcagtccgcagttcaaaagaataagcgctattgccccgtacaaaataaccgttgccaccaacttatacgggacagacgcatagctcgtcgacacaaccatatttttagactgcagtagcacaccttctatggaggtatcagtctcgtaggccgccaaagaaggttcttcagacataagagccaggttcggcaaagccttactcggagttccaagctggaaagttagagaagaaggttctccttcccaagttttatcaagtctaacccttagggtctcccccttgcagttactcagcttaagaggaacagttatcgcgtctagattttcgttaagcaattttggcgaaacaatactggtgtatagtatttcgtctttatccgctatagttagcaagtatttatccacaaattcgtttttcgaaacatagacgtcatgataattcgaattcgcagtatcagttggcgagacgttattctcaacattcacctgaagtgataccgagttaatttcgccagcatcaagaggaaactcttgttgtactgtaaacttgtcagcagaagtcaaggaactgaaatcactgtaagatacagacatctcaacatcattagaatcaagtttccctgggtttgtcgacgcaatgtccggctttaccacccatagattaacggtgaagcaaacaatcattacaatcgttaaagccacaccataaaaaagctttgcgtctgtagaatgaaataagaattttcttgaacacatgaagagataaaccaataaaaacgcaatctgtgccagtggtttctccaaagactttttatgaatttggctatacatctcatcaagctggttttgtttgacagtataaattgaagcattaccctcttgatctctagtcagagaaagctcagttcctgaaattgaatacgcggtaaaccaacgatcatctgaaacctgtgtttccgctcttaactctttaagcccagatttttcaccaggcacagtgatagataaggcttttgctttctcatttaatggatcgaatcttatggatgccacataattttctggatacgcagactgctccgaggaaccgtcatacacttcatcgacatcaaatttaaaaactacttttgacgtaatgtcagctgacgtagtttcagcctttaagtaaacattgatggcaggcatcggaatgagccacaagattgtactgacgatgccaaaaagaattgtcatcagaaagaaagagacaattcttttcttttttaatttcgagttcatcctactcaatatcacatgcaactcctcataaactcaaatccactcgattgctcatctatcatttcttcagccatggtagcagtcctgcatagcaatgaacctatgcgttcgcacataagaagtgtcctaaaagtcatggctccttttccgttgtaacaatgttgcaagagtattcccgcagccttcctaatcgccaccgctcagtagaatactgttctcgtgaagaatgcttttaagaagatctctgaccgttaccactacgcgatagtggtattcaaggaactggtgaaaactgatttccagttgcgctaccaaggatcattcctcggtatggtgtggtccgtgctgaagccacttatgctgttcgctgtgatgtatgtggtgtttgtgaagttcttgaagttctccgatgggaccccgaccttcccgatttcattgctgtgtggtacctgcttgtggagcttcttctccgaatccaccagtatgggtatgcaatccattgttggccgcggtgatttgctgcgtaaggttcatttcccgaactacattattgtggcttccaccactatgggttctatgatttctctcggcatcaacctgctcgtggtgatctgcttcggtttcttcgcacatgcgcattacacatggcgcgtattgctcgtgccgctcagcatcatccagttgtactgccttggccttggcgtagctttgctgctcgcgtcactgttcgtgtacttccgtgatgtggcacatatttgggaagtcatattgcaggccatgttctatgcaacgcctatcatctacccaatttccatgattgcggataagggatacggctgggccgccaatattttgatgcttaatccttccacccaggtgattatggatattcgtcataatctgctttctccggagtatgtgccgactgtgtggagcatggttgacaacaagctgctttgcctgctgccgtatgcgctaactgttttcattctgtggctgggcattcacgtgttccgcaagtacagctccaagttcgcggaggtgctctaaattatggctgaggttgcaatggttgaggaaaagaatgttgacgaacgccctgtggtgctcaaggttgaccatgttgccaaaatgttccgcctgcctacagaacaggctaccggtttgaaaatggcttttctgaattggacgaagggcatcaagggctataccgaacagcatgtgttgcgcgacattaacttcgaagttcgtcaaggtgatttcttcggtatcgtcgggcgtaacggttccggcaagtccactctgttgaagattatttctcagatctatactccggaacatggttctgtaacggttaaaggcaagctggtgccattcatcgagcttggtgttggattcaatccggagttgaccggccgcgagaacgtgtatttgaacggtgctctactgggcttcactcgtgctgaaatcgacgcgatgtatgacgacatcgttgagttcgccgagcttgaagatttcatggatcagaagctcaagaattattcttcgggcatgcaggtgcgcctcgccttctccgttgctatcaaggctcaaggcgatatcctagttctcgatgaagttctagccgtcggcgacgaagcattccagcgtaagtgcgacaacttcttcgccgaaatcaagaaagatccaacgaagaccgttattcttgtcacccattccatggattccgtcaagaagtattgcaacaaggccatcctgatcaaggacggcgaaattatcgtttccggaaacaaagatgatgtcgccgatcgctatacgttggaaaatctacgccgtaaaaagaaaaacaaggcagacaacgccgaagatgagccggcatatccgcttgggttgaatgaaacagtaccaattttaaacgtcaagcccactggcgatccggtgtgcaccatcgatggtggttttgactttgaggttgaatacgattaccggggaaccaaaaagttctatgttgccttggcgatgcatgatcttcgacgtggcggcctaccctatggcgatagctttgatttgaagcaagatgggcatcataaagtccatttccatttgccaatggatttgtttaacaatggagatttccgtattgtcgcttcaatgcacacatgggatgggaaagatccgtctaccgctgaaatgattgcatttaccaacgaagcgaatgcctgtgatttctccttgcgagatgcaaagggcaaagataattttgctctgataaacaaaacctcaatggcttatcagagcttggatcaaaatttagcaacacgccaagccttacaatcagcaatttagtacatggcgctgagaatgatttgaccggatatgttatccggtcaaatcattctcagcgccaatcaatagcattcttcaatactgtattttgaagtgaccgttgtactgatctaggttgaggttgaagaacttaccgcgattcttcaacagcggctgagcccaacggtcatagaaacgcatctgctcctgaatagctcttgcggccttctcaggattctgttcatcacgtcctcgactgctgaattcattatggtaaagcaatgcatccgcatcaaacactgtcagatatccagtggcattgctcttcatacacagatcaacatcattgagcactacagccagatcctcatcgaatccgttgatttgttcgaacacttcacgcctgatcatctggcacgcgcctgtaatggccgcgcaatcgaacggatgctgcaatgtttccatataacccagctccgctgccccgcaacgttggttgatgtaatcgcacccgttaggagatacccagacaccaccgtgctgtactagtccatcgtgatacagcagtttcgcaccaaccatgccaacatctggtctagcgaaaaagcccaccattgaagtcatccattccggctcgataacctcagtgtcattatttaggaacaaaaagatctcaccagaagcgaatgaagccccgtaattgcaaattgcggaataattgaatcctttacccggccacttaactacgcgcacattatcatgacgctgttcaagctcatcatagtaggtaaaagtttgcggttccacgctattattttccgcaataatgatttcatagttgcggtacgtggttttttcaatcaccgaagtaaggcatgctctcaacaagtcgatatgatctttggttggaatgacgatgcttactttcggctcatcggcatgctcataccgagcgcgatatcgaaacatcgcaggcaagctctcaacctttgcaggcagattcatccgatcaaaatgccgctggagcgcaagccttcccgcctccaccgcatacggtttgctctgtgcattggcactggtggaaccaggatgttctctccagtggtacagcatatgagacacattacgtatatcacgtgcgacttccacgcatttcagtgtcagatcgtagtcctgcgccccagaaacatccgcttcagacaagtcgacccgttttaaagcatgccgactaaccataagcatatgcgtcacataattgtaggaatatagcagatccttgttaaaggcaggtttgaagacaggccacacgtaacgaccgtcctggagcttgtcttcatcgcaatacaacaggtccacctgtggatgttgcctgatctcgtgtgcataccaatacaacgcatcaggttcgattacatcatcatgatcgataaacgcaatgtagtcgccttgcgccacagcaataccaacattggtattttcagcaatactcttgttttccgccttgaccactcgaatacgatcatcgttatatcgagccagcacattcttcaccgtcgtagaacctgcagtactaacatcaaccacaataagttcaaaatgcgtataggtctgattcagcacagacgacagcaattccttaaaatactcttcagaagtattgaatgccacacaaatcaaactcagcaacggcttctgttcccaagctccgcatatctccttctgagcacgtgcatcagcagggttcagtcgatgcttcctgaagaaaaaatcatagctcggatccagagaagcatggcgcagctccgccacagaaccgtcaagcagacgctgaaacttgggagccagcatgcaatccgatgcggcatcaagcacattattctcggcctgcactgttacacagaacatgcgtggattcatatccatagcaaacgcgtaggtcagcctacgatgttttatggcagtatccttaccttccgaacacatagaatcttccaagaccacaggagtcactgaaaggggttgcgcacactcatcaagcacctgcacgacgtatgactcgttctcgtttccgtgcatcgtggcggtacagcgaacaataaccctccctttaccgtccgggtaaattcccgtgacttcaacatgtgggttcccggaaatgagccgttcactaatatcgcgtatgacagccgcttgatcaggatgcattttgtatgtcagacgggaacgtatcttcgacttcaatggatcaacttcaacagtgaagtacacctttccctcatcgtttcgatccacaatatcaataaacagattcgtaccgtcaagcagtggaaaaactataaccgcatctcgattcgagacactagaccacatgttttccacagcgtcaagccaatataggtcgcacggaatcacttgccctgaaaccacggcacgggctgttaccaccaaatccgcaaaagaaacatcttgcaaatccgaaaatgacaacctcacgtacccttgaccgtcacctcggcataacgaaatggtttcaacgttcatattgcccttccttatggattaccatgcatagcacatctagtattaagctaaaacgatagtactattcccctagcaaagagaacgtatgccgcaactatccatcgtcattccggcgtttaataacagccgatatctcccggattgcgtacacagcgtcacccatcaacatttccgagacgttgaagtaatcattgtagatgactgcagcaccgatgacacatacgaagtcgcatcgcaacttgagcacgaagattctcgagtacgactcatccaacatgacaagaattcgggaaccttagcatcaaggaaaacaggagtgttggcttcacaaggtcaattcgtcatgctcatggatcaggatgacgaattggcagatggggcactccaaaagcttattgacttcggcaatgcaaatcccgcagatatttatcatttcggagtgcaggttgtggccgcaaataaatcggcacaggacgctgctgccggaatgacgtctttcctcaccccctgcgcacgcactttgcatgacgctgacattttgaaagcacagttcaacaccgataacgggttcgattggcatgttcaccacaaaatgtaccgaggcgattttgctcgcaccgcatattcatatgcggcagatcaacgtctcgtgttgtccgacgacctatatatgagtttcatttttggcactcttgcctcaacgtatattggtattcccgattcaccttggtatctctatcatcttggtcgcggagatacgttgggaacgcagcttactgtacagtccatcagcaccatggcacagcgtgacgcacaagcgttctccatggtcggcgacttcgcgaagcgtgacaatattcttccgcttcgcaatgattggcatgatcgtctcgacgatgttcggaatcgtctcattgagcacgctatgaacgagtggcaagataatctgccctcatcagacaagtctgaaggattgcagaacatactcactcattggcaagccgatgcagtttgtggtgagctctaccgttatattcgagattatgcctacgcctatctggtagcagacaatcgatcttccgacgttgcaataaacaaccgtaaacttgccaatcagtatttgcaaaacgtagagctcatcgaatccgcacattccttgcctcagcattcgaccaaccagcactatcttgatttacgcactatcgcaagacagcatcttcttgattcgggaatcataaatgccgaaacaaatcaggatcaatcaaccagagcttcccgcttgaagattatgttgaagaagcttttttcttctcattagagaatgcctattagttagactttagaaagttttggattcaagcaaggaatacaatgccgaaaatttcgattatcatcgcggcctataacgtaggcgattacctcgagcaatgtcttgacagtgttctgacacagacatacgccgattttgaagccattgtagtagacgatgcgagcactgataatacggctgatattatccagcagacagcagctaatgattctcgtatcacgcttgttcagcactctcagaatcttggcttgcatctcacacgtaagacaggcgtcgaaaaggcttcgggagaatatgcattcttcttggatggagatgacgatctcgcacctaatgcctgtgagcaattcgtcaatgcaatggaacagcatcccgtagatatccttcattttggcataaccgtcattggcgagaacggtattcatgatgatgagcgcaaagcctttgagtcattcaataacgcacccactccggattcaatgggcaaagatatagttcgagatatcttcgatgaaagtcgcggacaacgagttgattggcgagtcacgcagcgactcttccgaaccgatttattgaagaaatccttcgcatctatgagcagcagccgacttgaacgggcagaagatggctacgaatgcctcgtgatctcttcccttgccagctcttaccgctcccgaaaagactgccgtggatatcagtatcattacggacgcggagttactggcaccaatcagatttccgcacagaaatatggtcttttctgcgaacagttcaaagcctgtttcgatgcagcacaaatctattccgatagccactctgaactcgatctacaagattgtgtggatggatatcgttggaaagccaccgaactacttgccaacgatctcaatgtccgtgttgcagatgacgaaaaaaagacagcagttcaatccatgattgctgtatttggtcaaaacatcaccgcttgcgaagtatggcgattcatacgagataatgcatggaatgccttaacaagtaaggataacgctgaatacatgtcccgagttaatgcatggcacgatatttcaaatattttcgacttcacgcaatcaaattcggttgaagacaatcgttatcaaaatgtccggcacagggcagaagaactactttccgatctggcttccgaacagaatatggacaactacaataaccagcgcgttcgcctgttcgtcaccacgcataagaatgtgaatcgatttgagagcgatatcatgcagcctgtgcaggttggcctgcacgaaggcagctatcgtttcccctgggcgttccacgatgacgaaggcgagaatatctctgaccgcaatccacgctattgcgaactgaccacccaatattgggcgtggaagaatgtagatgccgattattacggcttctgccattatcgccgctattttgatttctccgacactcctcacaaggagaatccatacggcgaaatcatggatgactacatcgacgccagagccgtgaaagaatatgggctcgatgataaaaacatcgagcagatagttcgccaatacgatgtcatcaccaccccgtttggagatctcacaaagatcatcgacaagcatggtactcctcgcgcattgtgggaagccgctcccctgctgcacgatgatgatctgctccgctgttatcggattctatgcaagatgtatccggattacaaagaggatgccgatgctttcttcaagggcaacaaggcatgcttctgcaatatgttcattatgaagaaggagatcttcttcgactattgctcttggatgttcccgattcttgaggagttcgataagaacaccaactatagtgcctacagcaaggaagcgttgcgtactccggggcacctttccgaacgcctgttgaacatctatttgatgcaccataagcgcatctgctctaattggaagttcaaagaactgcagtgcgtacatttcaccaatccggaacctgccgaagagctgaagcctcttgatgtgtttgacaagccgattgttccagtcgtgtttgccgcggatgataattatgttccacagctcaccaccacggtttattcggccatgaagaatgctgatccgacatatttctatgatgttgtggttctacaacgaaacatcgcttgggataagcaggaacgactgcgtgacttcttcaagcagttcccgaacatgtcattacgattcaccaatgtggagcgtgagctgtctggatacgatctttccacgaataatgctcatatcagcatcgaaacctactatcgattcctgatccagaagctattgccgttctacgacaaggtgctgtatttggattcggatatcgtcatcaatggcgatatttccaagttgtacaacaccgacttgcaaggcaagttgctcggtgcgattcgagatatcgacttccttgccaacctcaacgtcaagcatggcaagcgcatggggtatgccaagaatgtgctgaagatgaagaatccttacgattacttccaagctggcgttctcgtgctcaacaccaaggccatgcgcgagcgctacaccatcaagcagtggcttacgtatgcgtctaaccctgcgttcatctataacgaccaagatgtgcttaacgcacactgtgagggagaagtactgtatttaccgtgggagtggaatgtggttcacgattgcggcggacgtgtcggcaatctgtttgtgcaggctccgaacgacatttatgacgcctacatgaagtcacgcaacaatccgcaaatcatccactacgccggctttcagaagccgtggactgatccggattgcgatttcgcatccatttactggcgttatgcgcgcgaaacaccgttctatgaacgcttgttgaagcgcgtggtgaaagccactgctccttcgaagcctgttgttgaattcgtcaagccacctcgtgctattggcgaagacaatgccattcgacgcattatcgacccaatcatgccgatcggttctcgtcgacgtgaacttttcaaggcagtcggacgcatagcacgaagccgacactaattaacactgaacagtaagccggtgaggggcattgatactgcctttcaccggcttactgttcatcctcagctgtttgtttgctcaccagccccgagcattccaaacataagcggcacaatcatgaccattggtatgagatatctcataccttctatggtcacggtagccggtgaaatccataagaacaggaacgtggcaacataaggtgccagccacgcgcaatgtcgctttttacgacgtatgcactcatagagaacaaacacgaacatccatgtcgaccacaccgcacgcgagcataatagattcactattggagctcgtgctatgtgatcattaatcgtctcttgaagtttctgcactgcatttttgaagccactaaagcatagccctaatttcaccgaatcaggtaacgcataatgatcgcttcctaaagcgtacgtctgcattactaaatcaccagcattcgaatcagtaggtgaaggaatgcccagccaagcctcctgcaaagcgacatacgcttcagcatatgtttccggatgagatgccagcccatggatccaagcaatcgcatattgacctaaatattgatcattctgagaatcccaagaataacctttcacattgtccgacgcccaccattggtaccggtcggctacatcatcacccagaattttgtagataacctctagatcctgtctcgaaacatcattttcatgccgcttcaccagtaacgcggattgctgcaacggaacagcaagcatctcttgttttccaccttcctgtatatggaatacagggaaaacaattttcggcatcagtatcataaataccgatataacgacagtaaaaacaccaacaacacgcttacgaataatcgaagatactgcaaaaaataagataatacagcatataagcacgatgtagacgccagtttttttcgtaagccccatcaaaagcgcagtcagtaaaaacgccgtaaaaaattgaggctgtttgagtaatactccctgagttcttaccgcttcaacaaatatcatggcaaaccagataaaaaacggcatgaacaacgaatctttgaccatcgtcatggaaaacagcgcagtaaaagggaataccgcaaagaaaatcatttcagcaaaacagaatcgccatccagcgccaatgtgacgacagtaaagaatcattgacgcaagagctgcaatggtgaccagttcgataactatgcaccctagatacaaccctcgatcagccgagccgaaaaacgctcctaatcgcagaaaagtaccaaatatcatagtgtcgaaaacaggatggtgatcagagagataactaccatcagtaaaagtattcggctggccattccattggagcagttgctgctcagtgtcataccagatgacacccggataagtaacaatcagatacggaagccagcacaacaccaacacaaccgcaattaacgcaaactgtttcttcgatgtcttaaaagagaagatctcccgcaacttacgcgaaacgtttcgatacgtttcaggctcccgattcaaccaagccagcacgcactctaaaagcaacacgaaaaggaagaagagggttgcgattacgagcgtgcaccaaagcatacgaggagtgcacaccaactggttatactgtcggacggaatccacaagcgacgccagaaaaccacagactatcgcaaaaacgattagtaacgcacactgctccgtactcttttgaatcacggccatccctcaagcctccggcgacatcccagtacaagtcgaaaatagcttatcaaactatggtcgccgttggctatactctgaccggcataaccttcgatactgcagataccacagcatatggaaggaattgtgtatagccagcacacaatgaaaagcagtcgtagcttttccttaaagtagaagaggacgattagcaaacatagggtgcgaaagatagtatgcgactttttattcagattccatgtctcaatgaggaaaagacacttccactggtactggagcatatgccgacccagatcccaggaattgatgacattcaactgctcatcatcgacgatggctgctcagataaaaccgttgaagtagccagaaagcttggcgttaagcattttgtgcatcatgccaagccaatgggtctggctcgcgcgttccgtgacggcgttgactatgcgctcaagcatggtgccgatatcgtggtcaacaccgatggcgataaccaatatccgagcgaaaccatcggagaacttgttcagcctatcattcgacatgaagccgatatcgtagtgggcgatcgccagaccgccaccatcaaggaattcagctggttcaaacgcaagatgcagcatttcggctcttgggtggtcaataaggccgctggaaccaatattccggatgcggcaagcggcttccgtgcctactccaagaattccttactcaagctcaatatcgtcaccgaattcagctattgcatggaaaccatcatccaagccggcaacaagcgcatcgccattacctcatatgcaatcaccaccaacccgaagacgcgcgaatcccgcctgttcagcaacattttcgaacacatggccaaatccggcggcgctattattcgcagcttcctgatgttcaaatcgaacgtcatcttcaaatgggctgccatcatctttggcgtacttggattgattccagtagtacgttttctagtgcttgcctgcatgggacacactgccggtcatgtgcaatccttactactaggcgtcattctgctgatgcttgcagcgttctgcattgccctgcaaatcatctccgaagtccagcgaattcaacgcaaactcgtcgaggatcagcttgaaagaaccaaagaaatcctttattccgctgaataccagaaaatctgggctcagcaaaacgagtacggagaattccctccagcccagcaacttagctgatttattgcaaggttccatacaccctataaggaaacccaacattcatgtctacagttcttgcatttggcacctatagcgtgaggaagcatccacgagtcggcattctcatcgacgggctacgtaagaatggctgcaacgtcgaagaaatcaaccagcctcttttgctttccacagcacagcgcgttgaaatcctgaaaaaaccatggaaagtattcggattcggctggaatttgcttcgtctttggagattactcagcaaacaagcacatgcatggacgaagaagaacggcaagccggatgccgtgctggtcggttatatggggcatttcgacgtactactcgcccaccatgtatttaaaggcgtgccgattattctcgatcatctcatttttgcaggagataccgcgaaagatcgtggcgctcagggactaaaagtcaaactgctgaagagactcgaccgcatggccatcaacgcagcatcgctcgtggtactggatacaaaagagcatcaggccatgctcgagcctgaagatcaaagcatggtgattccagtaggagccccagacgaatggtaccaaacaaacaaatatgacaatacgcgcaacgctagtatcgtgttttatggactatataccccattgcaaggcgttccggtcatagccaaagcagcacgaatacttgctgatcgaggaatgaccccacaattcacgctcatcggcaaaggccaagattatgatgaggtccgttcactttgcgaagggttgaataacgtcgaattccgcgaatgggtcgagccggaagaactacctcaaatagtggcatcacatgacatcgctttgggtattttctccaacaccccgaagggactgcacgtggttcccaacaaggtgtatcagtccatggctgccggatgtgcggttatcaccagtgatacacctccgcaacgccgagcactaggcaatggcgtggtatatgtggctccgaacaatccacaagcattggcagacgccatagcgtctcttatttcctctcccaatattcttgcgcgcaaacagagcggcgccgctaaaaacgcacaacgattcactagtgacatcatcacacgcgaactctcccaatggattaaagaacattaatcacgctgcaaggacggcaatgaacaagctaaaaaaagttatgaactcgccactaatccgttggtttttcctcgccatcgctttagcagcactcatatgggttatcatcaaaaattggaatcctcttgtagctgcacttaccacactatcgtggcaaatcgctacggctggatttctcctggccgttgtatacgtctttttcaccctgtggtcttggcgcgtcattcttgccgatttgggatctccactcgattggagcacagccacccagttatttggcatcagccaaataggtaaatacattcctggcggcgtatggaatattgtagccgcagcagaaatcggccgagatcatgacattccagcccgccgttcagtaacggccatgaccgtagccgtacttatctcgttacttaccggaactggaatcggtgtcatcactatacttggtacctctgtagccattcaggtaccaacttgggcaatcgtactattgctaatcgcgctaatcgcgttacttatgccccctgtcttgaatcgacttatcgcatttggatttaagttgcttaagaggccgacaccggaacgccagatatcatttaaaggtttgggactggccacattattagcggtcattgcatggtgcattgccggcgtacaagtatggctgctagcttatggcttcggcatggatctttccatttccaatatggcactttccatcggagcatacgcattggcctgggtagcgggattccttgtagtattcgtgcctgcaggaacaggtgtcagagaaggagttctaggtctcctattcgcaggctcgctttcatctggaggcatactggcagttgtgttagtaagtcgcattaccatgacattcgcagacctcgctttcgcaggagctggcgcacttctgcggatgtcaaacaaaagataacacctagttcttgtccttcaaaatcgggaaacgccgttcagctacatcccaaaggacatcaaaccaatgacctttgttcctatcaatagtcaacttgaaaagcagtgcacgcaccttgtctaaaatcaacgttacaacaaatacagctatcccaataacaaaaacgatcagaaggatgaccggcgcagagtatgtgtcataccaattcgaaagattgaaccactgctgccataatatccctcggacataataatgctctgtaattaggtatatcccaaacgtcgaggccgcacaactattgacaatacgactttggaaatgtagtcggcaaaataacaggaacagcccaaaacttagagcaagtgaaagaaccgaccattctctctccaaacacaataagtactcatagatcctgtcgctatgacctacagtagcaaatgacacaattacgttccagagtaaaattactataattgagattaaaaacatttcccatgcagtggcagtttgaaacggtctcatgtaccacttgtagtatgcgattagcacaaaaacatagataaagcccatggaattaaggctgatttctagatttgagttaggaatcagcgtcaatactccccataaaaatcccatcgcaagacaacactgtccatggtatttctttcccaatgcacgtagtccacgcactagaaatggagataggaaaaggaaaatagcataacttgtcgcataccaccacgtattgcgagacagagggaacaatatttcccaaagggattctatggttctttcctctggtactttatatagagtcacagcacccaaacataaactccaaaaaagaagttctctctctaaaatccatacttttcgacaagataaacgcaaagaaggcgtcttatccacgacgaaccatgcggaaataataaagaacagcgcaattcctactttacctggagtgaaatagaataattgcaaagttagttttcttacagatagctcttgatccaacacaggcagcgcattatgcatcacctcgtggtgaagcacaataagcagcatcgcaataattcgcagtaattcaataccggactcacggtttttgaatcgtttctttacacccattcaacacctgtttcaactatcgtcgcaccataaaagtatctttgccgtcgccatcccaatcaccaacaagaacggtatcgcttgttttgccataactgaatgcttcatcagcgacaccactggcaatggtatttttcacatagaaagtgctgccacggcgcacagccaaagaatctttgccgtcgctatcccaatcaccgacatatacttgatcatcatcgcgaccgtatgtaatcacagtgtccgcattgccaccagtcagtgaattcttaaaatagaacacattgccccgtcgaacaacaaaagtatcatgtccgtcaccattccaatcgccaacataagtttggtcttcggaacgaccgtagataaacgacttatcggcaattccaccctctagcgaatttttgatatagtacgtagaccctctacgcactgcaaatgtgtctttgccatcgacatcccaatctccaggcagtacaagatcttcgctcttcccgtaactgaatgcacaatcagcatttcctccagtcaacgaatacttcgtataaaacatatttccacgacgcaaggtcagggagtccttaccgtctccattccaatcacctgcgtaggcttcgtcaccagcacgaccgtacccgaacgaaaaatcggcagcgccgcccttcaaagaattagacacataatatccggttccttccggataatcaggaacatactccttattcccaaacgcattcatgtccacattgccgctgatgccgtccaccttgccggagctggtgtattgccatccgcgactgttggtcgggaacgagtcgaatcccatgcgagcgccgtactgcgccacccacgtggttttggcgtaaatgtcgacatgtttcagcggcccttgcaggtagctggtgtacgagtagacgcccagattcttgtatccggcggactgcagcgcgctgtaccaattgttgacgatattgttgtacacgttcgggtcggtgggcggctgatgcccctcccaggtccacttttccaggtcgtaatacacggggtacgccagatcgctcggattcacgccaaactgcttgagtttggcgaccacgtcggtaccttcttctttggcgagcgccggagtgtccgcgtaggaataccagtagatgccgaacgggatgccaagtctcttgcattcggaaatgttacgttgcgctttcttgtcggcattgttgccttcgccgtagccgaggcggatgatcgcgccttccacgccgtcggctttcgctttggcccaatcgatgtcgccttgccatccggaaacgtcgatcacgcctttggcttgctgcacgaacagattgttctggtagtcgaagaaagctttcgaattgttgtaagtgccccagtgcgcgccgtattcattgctttcgaatttggagagctgtacgttcgcgtcggctacagcatttttggcatcttccgcacttaccggaatgaaggattcgccgttggttttggcgagcggatccggctgctgatctttcgtgccgaccaatgttggatcggtcacgatttcaccagtttcgatgttcttgacctcaccttcggaggtgacggccaggtcttccgaaaccacggtggcatcgtcggaaatctcgtcactgacgttatccggaagtttcgcattcggattgtcgggcatgctgtcttgcgattgctggtcgcccgtctgatcatccggctgatcgtcagactgcataacaacaccattatctgcagtaacggaaccgctttgcgcaacagaatcctcaatcgcaatatcctgcaatgcgtaagccggcgcaaccgcaacggaagcagtcaacgcaaccgcagacagcgcagtcacgatcttcacaacatgatgtggcgaaaccattcgtcagcctctcttgaatacagtcatcaaccccaaatattcggcgcaaacgccctaaccgccaactctaactgcaacccacaaccccgtccatccccaactccaaaatcatcccaatccccacatctcacgcattacacactgataagaatcgactagctcgttaggggcaccgatatggcatcatccatttccatatctcctttccagcattctcgctgaccttcccatcacgcttcgtagagggaccatttccaggaggggagtacgtggatcgtgccagtggaatcgggaagttcgatggtttctccctcgttaagcgtgagaatcaggccggaatcaacgttggtacgttgcataaccgcttgcagagagccgatttctcgcgccctggttttctcatttcccatattggcacacacttgaataagcccatacggttccatagcaagagcatcgccgataagaaagtcaactttctcctgtttggacgtcggcatagtgtacgaagtgattgtttccgtacgcctaccggaagttcgtctctgcaattcgcagaaaatcgcagtttccagtcgttttccaatatcttgctggttggcgcgtgacaccgcgtaaaccataccctgatcgacggcatacattttcggcaccgcagtactacccggcttgagcatggtggagtattcttcgagctggtagacaaggaatgcctgcctgaacagatcgagtaacgtattcgccttatcccaatagattttccagccgaccgctcgcaacgtttccacaagaccattggtagacagctcgcaggccgtattgcgcagcaaaaacagcgctatctgcgtggcgagagtaatgttttcacgaccaagacgctcggcaacgtcacgcgcaaccacgtcccgcacgtaaccttggagcgtttcaatacgatcagcttcaaccatacgttgcactgcagggaagccgccaatagttaggtaatcgttgtaggcagcttcaaaccgggtgacctctcgcggcgaaaacacggcatcggcaagagtgctgcccgctgtaggcgtttcgattccccgaaagtcgcagaattcacggaaagacagtggcgccatggcatgcggatgcgatcttcctcggaaattcgttgcgatttcttcgctggacagtttcgaagacgatccagtaatgactagcgtcacagcttcatgttcggctatgcgctggcagaatccctgccaattggcgcattcttgcacttcgtcaaggaagaggtagcagccatggtcacgagagtcgggatattgccgccagtattccgtaacaatatcgttgagcacggtgtcttgcattggttgcagacgatcgtcagcgaagttgaaatagaaaatatcattacgcgagacgccgttttgtaacaaatcatgaattttctggaaaagatagaacgttttgccgcaacgtcggatgccagtgatgatgtgcacagcattgaacactgccggctgcggcagctcgcgtatgatttcgatgcggcgtgacggcgtaggaatgtcaaactgcatggactcacgaaccagcatggcatacgattcacatggattatccggcaccataagttcttcctttcgccgtccgttgcgaaacacccaacaatcccagcataacacttctcaaaaattttaagaagtttccaccaacacttctcaaaatttttaagaagttaccacagacgaataaaactccagagaatacctgaatgcattaacgactacaacacgagtgtgggaaatcggggaaggacgggtatcgtacgctgtatattggcatttcaggtggactctcggaacgtgattcaattgacctgaatcgggagctgtcaccggggagtacagaatagtaggcagattctggaggggttatggcacggcacggcaagaagccaagcgaggaaagtacctcgtcacacacaccgagaacacttgccggaagcgcaacgaccaacacttctgccgacagcactgacgccgctgccagcggtatcgcagtcaacagctcgaccgtcagcagcgcatttgccagcgatgccgatggcaataccgggaatacgcttgtcggcaacgcttccaacgaagtcgaagcaaccgaagtcgaaacccgcccgtaccaacgcaaccagtaccaacgcaaccggagagcgcacaatcagcagcagcaacacggctgaaaccagcaaccggcaatcacacgaatccagcgaatcccgccagccgcaagacctattcgacgcggccatagcgcaaggcatcagcgacggcgacgcttggacggaccagcgcgtaaagcacatctaccgccagatcatcatcgccgtagtcgtcgtagtcgttgttctgggcgcggtcttcggattcacaggcgtgcgcgcatcgcagcaaatgcgcgacctggccgcactcaacgactgcaaggaagccgtcacggccatgaacacctcctattccaaggcgttccagctgaaggcgaagatctccgaagcgttcaccagcttcgacgggtcctacgatctcgacaagcttgccgaactgcaccagacggaagttaccgcgccgaaaacgctgagctgcgccgccgacacttccgctaccatcagcaaagccaacgccgcaaaagccgagtacgacaagcaggccaagcagttcaagcaggctttgcagaagagcgacgaatccgcggccaccgatggcggtgacggaaccgacaatagcgctgacggaacggacggagccgcagccacggacggcgctgccgactagtccaacgcgaccgacgcaaccgacgctggacgattaattcctccagtaaatcagttgatcgcaacgcgaccaatcaaaccggccatcagccttaccgctttatcatcagccttaccgttttacgtttctcccgactctctttcgcgttatttcacacactcagcgtttcttttgatcataagatcaaaagaaaggcaaacggcaggcaaaagaagaaacgctgaaattccgccattctcaagacttcgcaaacgcaaaaacgttaacgattcaaaagaaaccgcccctcagtcaaatgacaggcaaaagaaacgactccgacaatacaacaggcaaacaacgatcggatgaccatattcgtgcgtatcgtagcaaaaatggctaggctacgacatgcagacatgctttacccacgtcatgcggaaggggctgctttgaacaggaaacgactggcacgcgtgattattgccgcggtagtgaccgcggcaattctggtggcgatcattgttggttgtgggccgaaatggggcgacggttcagcgaatcccaatgccggtaacgccagcagctcgaacagttccggcgactccagctcctccagcacaagcagctccagcacaagcgacgattcgtccgcaaactatgcgacccgcgtatcggtacaactcccctcctgctacatggagaacatggttttccaacgtgggaaaacgctggtagtcaaaggaactgcgcagacttcacaacgtggaaaagttgttgacccaacgcaactgattacaacgatttcccaaggaaagaaatcagcatcagcacaagctaaaatttccaaaaatggcgatttcacctgcaccttacctaaacaaaaagcaagtcttaaaccatattcattaacgattttatacaacgaaaccactttgttgactctgaaaaacgtgtatgttggcgacgtatttattgctgccggacagtcgaatatggaattgaattattcgcaatattatgagggttcaggcaactcctacaatttcggcggaggtctgataacgaccgacgatctgccgaagcagctttccgacaacaacgtacacttcgttgcgagcgccaactcctcgaaaggtacggattttccgttacgcgacgtgaatgagcaggctggcacctggcttgaggcgaccgccgataattcgcagcatttcagttatctggcgcagcagtttgccatgcagcttcgtgccgcgcatccgaacgtaccgatcggcattattcaaaccgcatggggtggcacgccgattcgacgtcacgtgcaaggcggtgatatttatgcgaaccatattgcacctttggaagggttccacgtggcgggcgtgctgtggtatcagggatgcaatgattccacgaacgaggcgaccgcgctggcgtacgagtcgcagatgacgctgctgatcaaccaatatcgtgaagtgttcgatcaggatgatctgccgttcctgtatgtgcaattggcacgctggcctggctaccagtacacgcaaaacgtgcgattcgcgcagttgaacacgttgagcaatgccggattacgcaatgcttccaacgttgcaatgacggtgtcgcttgatacggacaagggcacttcaacgttgatacatccgcttggcaaagatattctcggcgcgcgcatggcagcgcaatatctggcgatgtcggaaggcaagaccattcccaacgggccgcttatcgcacatgcgaagcatgcttccgatggcacgatcgtattgtcgttccagaacggcaccgcaaccggtttgcaggcggaaaagcccaattattcgaagactgagagcgcgaccgtgcccgattatgatgcgaatccggacgcgactcctttgaatggtatttccaacgttgcaacgccgacttccacgccattgcaaggttttgaaattgccgacgattccggaaagtgggtttcggcaacggcaacgattaagggtgatcagattgtgctgagtgccgccgatggaagctcgaattgcaacgcggtaactcaagtgcgttactggtggagtgggaatccggttatttccagtctgctgtataacgatctcggattgcctgcaagtccgtttattgctgttgttgagtaatacggcagattgataatcgggcattatccggctgcgacgactaatcgataaagcggactgtaattaggttagaatcaggcctgtttcatcgaacttaagtcgaaagcaatgtcgacggtcaaaatcgacgatcaatcgacgtagtgcggggcgctggacgctatgcggggcgttatggagccgctattgccgttgccgtcggtactaccgtctgcatcgaaatcttgcgatttacgaagcgagccggcagccagcgaacgtatggatcgaacggaacggccaatctgcgcctgtttttcctgagcatccgacggtattgcgggaatcgtgcccgtcacagggcgaatgcggccggtcgcagtgggaatgaagcttggcggcaacacctgcgtggtaacggcacccggcgatgacacatggtagtgggccatcgaagccagggaatcgcgggtatcgagttcacgctgcatatctagctcatcgtcgaactcagccatcgctgccctccctctcttcaagcaatctctgccggtaatctctccactggcaacggtcatcgttccgagcgtaacgcaaggtagcataccgttacgaacgaaatcagcgatatgcgcaactcccccactgtttcgcaacttttccgttgcacgtgccgcagcgagccacgccagcgagctattgaaaacccgccgttttggcataaaaaaaggcttccgaaatcatccggaagccctactggcggagaatacgagattcgaactcgtgaggctgttacaccaacacgctttccaagcgtgcgccatagaccactaggcgaattctccaattatgcaacgtctcacagtgtctatccgcgaaacgcaacttgattaggatacaacagtttctttcaaaccccaaatcggcgtgtcgcaacgtcccagatcgcccactcactggaggaatccgtacacgtgaggacttccccgcgcaccgaattttccaccctctgggacaattcacccgccaacgcacctctcagcgtcccagatcgcccactcactggaggaatcagcccgctgccaagactctcacagtccgaattcctccagtggctggaacaatcagtacgcccataggccttctacagtccgaaaacctccacccactggaggaattggtacgttggtatgcttcccagcatccggattctcccacccactggaggaatctgcccgcacatacacccccgaattgtccagattcttccagcgagtggagggatccggacacgagctcacgtaccgtgagcacagcagctatcgtttggacgcgaaggcacgcaggtcggcgagcatggcagtgaacatcgggcggaccggaccgaacttatcaagcagcgatcccgaaaccggagcactagccgctcccagcaacgcgccaggcagcaacaccacgcctgcagcaagcacagacgcgccgaatcccagttgcgaagcgttcggaatcatatagccgtaaccgatcgtcacaaactgcagcagcacatacgcaagcaaatgccaacggaatttcacactccgcaacacggtcagacgaaccagcggcgagaacgcacgatgcgacacccaagcgaacactagcaaagcggccatggcaatcagcagcagaaccactgcaatcacacattgcgtagtcgcggaagtatccccattactcactgcggtaacggcggatccgccacggtcgagcgcaaacacgaaacagacgaatccgactgctaggcaaagcacatgcagcggattgatatgcgcctcttcggtaggagtgacctgatgaatcgttttaaggccgcacaccagcgaaacaaacaggaacggcagcagaatcacgaaaatccaacgccacggcatgaacgtgccgacaagaccgcccacagtcggtccgagtgccggcgccacagccaccaccatgcctccgacgcccataagcatacctattttgcttttcggagactgtccaagaatgatattgaacatcaacggaagcgcgattcccgtgcccgctccctgtagtattcgcgcggtcatcagcataggaaagttcaacgtgcaagctaccatcaggcagccggtgatgcagagcacgattgcggtaaggaagatggtacgcaacttcagtttgcgcttgaaatagcttgagagcggcgtgacaagcgctaccgtaagcagatagccggtcgtcagccattgaacagtggacgtgtcgacgtggaattccgccattaatccagggaaaagcacgttggtgagggtttccgtaaggatgccaatgaaggccatgattccagttgacagaatggcaagaataagattgatggagatgttctcgtcatcttgcgttgccgtgttattgtttcgcgcaatggactgtgacaaggatttgcggccgttcccggccttccctttcttggcccggctttgctgagccaccattccgttatgccgggcagtttgccggaatggcgattatttgcccagaaatacaaaaagatccttgggagcggagcgctctaccaaggatcttcatattattaagttgaatgcggcggcgtgctactctcccacaccctctcgagtgcagtaccatcgccgcgaccaggccttagcttccgggttcggaaagggaccgggcgtctcacctgggccatgaccaccgcaaaaccaatataacggccaaccacaaggatcggccggcagaaccggaaccacgccacgattccgatcgtggcggtccgggaaccggacaacggacgcgaacaaccaaacgcttcaccggtatcgtcatcgtgaccacaagaaacaacgctccttgccatccaacgaaagaaaccaccacaggacgagacccgacccagcaagcgggtcggaaaaagtgtgccgcgttcgcccgttagtaccggtcggctccacccctcgcggggcttccacctccggcctatcgaacacgtgttcaacatgcgggctacaggcgctccggggagcgtcaaggaatcctaatcttggagcaggcttcccgcttagatgctttcagcggttatccctcccgaacgtagccaaccggccatgccgctggcgcgacaaccggcataccagaggtccgtccacccaggtcctctcgtactatgggcaggcctcctcaggattccaacgagcgcagaggatagagaccaaactgtctcacgacgttctgaacccagctcgcgtgccgctttaatcggcgaacagccgaacccttgggacctgctccagccccaggatgcgacgagccgacatcgaggtgccaaaccatcccgtcgatatggactcttgggaatgatcagcctgttatccccggggtaccttttatccgttgagcgatgccgcgcccgtgcgccggcaccggatcactatctccgactttcgtccctgcccgaaccgtcgttctcgcagtcaagcccgcttgtgcgattacactcgaaacccgattgccaaccgggctgagcggacctttgagcgcctccgttactctttgggaggcaaccgccccagttaaactacccgccaggcactgtccctgaccaggatcactggccgaggttagacgtcaaacgagaacagagcggtatttcaccttgcggctccacacgggctggcgcccatgcttcgaagcctcccgcctatgctacacaatccgcgcctaacgccaataccaaggtatagtaaaggtcccggggtcttttcgtccttctgcgcttaacgagcatctttactcgtactgcaatttcgccgagctcctggtcgagacagtggggaagtcgttacgccattcgtgcaggtcggaacttacccgacaaggaatttcgctaccttaggatggttatagttaccaccgccgtttaccggggcttgaattcaccgcttcacccgaaaaggggctgacggatcctcttaaccttccggcaccgggcaggcgtcagtgcatatacagcggcttgcgccttcgcatgcacctgtgtttttggtaaacagtcgctaccccctggtctgtgccaccccccaacgctccgagggcaagcctcttcacgcccgggggtctcccttataccgaaggcacgggagtgatttgccgagttccttgaccaggattcgctcgatcgccttggtattctctacctgaccaccagtgtcggtttggggtacgggcggcaacgcccctcgcgccgaggcttttctcgacggcctggaccaccggatatcgcgcccaaaagacgcccatcatcacacctcaccctacatgccccacggatttgcctatgggacgggctgcgtgcttgaccacggaaaaccacctccgcggccggctcccattccgtgtcacccctgtgcgctaacctaccaggactacgctcccaacaaccgcggaccccgaaccccgaagggaacgacgccacgcgaccggaggttagtactcatccgttcggctcttacggtacgccgccggtacgggaatatccacccgttcatccattcgactacgcctgtcggcctcgccttaggacccgactcacccggggacgacgaacgtggccccggaacccttggtcatccagcggacgggatcctcacccgtctctcgctactcatgtctgcattctcactcccgcgcggtccacggcacgtttccacggccgcttcgccccacgcgggacgctctcctacccagcagccgcaaaggctgctgccgcgtcttcggtggtgtgcttgagccccgctacattgtcggcgcggaaccactagaccagtgagctgttacgcactctttcaaggatggctgcttctgagccaacctcctggctgtctatgcgactccacatcctttcccacttagcacacgcttcgggaccttagacgacgatctgggctgtctccctctcgacgacggagcttatcccccgccgactcactgccggaatacacatccacggtattcggagtttggctgctattggtacccgacacgggcccgcaagcatccagtagctctacccccgcgatgcaatcaaccgacgctgcacctaaatgcatttcggagagaaccagctatcacggaatttgattggcctttcacccctagccccaggtcatccccccggttttcaacccaggtgggttcggtcctccacgcggtcttacccgcgcttcaacctgcccagggctagatcatcccgcttcgggtccagggcgcgcgactcaaaacgccttttgagactcgccttcgctacggctcccccaccacgggttagcctcgccacgcaccactgactcgcagactcatttttcgataggcacgccgtcaccccaccaacggaggctccgacggattgtaggcgcacggtttcaggaactctttcactcccctcccggggtgcttttcacctttccctcacggtactggtacgctatcggtcagacaggtatgcttagacttaccccacggtcggggccgattcacacgggattccacgaggcccgcgctacttgggacgcatgatcggaagacggcaagcttccaggtacggggctggcaccctctgcggccaggccttcaagcctgttcccctggcaagccgttttatgactcccgcccggtccgtcggaaccgggacacacgctccctcaacaccacggacgcaacccccgacgggtatcacgcgcccatggtttggtctgatccgctttcgctcgccactactcacggagtatcccttcctgcaggtactgagatgtttcacttccctgcgtacccccggaacaacaacgttccgtgccggcccatgacggccggcgggttgccccattcggaaatcctcggatcgaagccatgttggaggctccccgaggcttatcgcatcctcaaacgtccttcatcggtactgtctgccaaggcatccaccatacgcccttcagggcggcacacgccccgaaaaacccaatgatagcttcaaacgccagacgacaaatcatcacactgtaaaaaatgatcacaaaacgatcgatctcgaaaccagactctccaaaaaagaagagcctggcgaaatcgcgataaagcaaacgatgacataacatcatcgcattgctcgcgtccactatccagttctcaaaccaccacgcgccccgaccggacccggcccgcggcccgcaaggccgacggcgtcccgccaggggcatccggaaaaccgcacgcgaccaagtcgcgggtggcggtccgggaacccaaaagcatatccgcaccactccccgccggccccaaggaccagcgaagcccatgatctcttccacaccagcacgcccacgccagaccggagacgatccccggcgcatgggccacacgacggacgacaaaccatcgtcctgaaaaactccgtagaaaggaggtgatccagccgcaccttccggtacggctaccttgttacgacttagtcccaatcacgagtctcaccttagacggctccatccacaaaaggttaggccaccggcttcgggtgctacccactttcatgacttgacgggcggtgtgtacaaggcccgggaacgcattcaccgcggcgttgctgatccgcgattactagcgactccgccttcatggagtcgggttgcagactccaatccgaactgagaccggttttcagggatccgctccacgtcgccgtgtcgcatcccgttgtaccggccattgtagcatgcgtgaagccctggacgtaaggggcatgatgatctgacgtcatccccaccttcctccgagttgaccccggcggtcccccgtgagttcccaccatgacgtgctggcaacacagggcgagggttgcgctcgttgcgggacttaacccaacatctcacgacacgagctgacgacgaccatgcaccacctgtgaacccgccccgaagggaagccccatctctggagcggtcgggaacatgtcaagcccaggtaaggttcttcgcgttgcatcgaattaatccgcatgctccgccgcttgtgcgggcccccgtcaatttctttgagttttagccttgcggccgtactccccaggcgggatgcttaacgcgttagctccgacacggaacccgtggaacgggccccacatccagcatccaccgtttacggcgtggactaccagggtatctaatcctgttcgctccccacgctttcgctcctcagcgtcagtaacggcccagagacctgccttcgccattggtgttcttcccgatatctacacattccaccgttacaccgggaattccagtctcccctaccgcactccagcccgcccgtacccggcgcagatccaccgttaagcgatggactttcacaccggacgcgacgaaccgcctacgagccctttacgcccaataattccggataacgcttgcaccctacgtattaccgcggctgctggcacgtagttagccggtgcttattcgaaaggtacactcacccgaaggcttgctcccgatcaaaagcggtttacaacccgaaggccgtcatcccgcacgcggcgtcgctgcatcaggcttgcgcccattgtgcaatattccccactgctgcctcccgtaggagtctgggccgtatctcagtcccaatgtggccggtcgccctctcaggccggctacccgtcgtaggctcggtgggccgttaccccgccgactacctgataggacgcgaccccatcccataccgatgaaatctttcccgacaccccatgcgaggagtcggagcatccggcattaccacccgtttccaggagctattccggtgtatggggcaggtcggtcacgcattactcacccgttcgccactctcaccaccaagcaaagcctgatggatcccgttcgacttgcatgtgttaagcacgccgccagcgttcatcctgagccagaatcgaaccctccacaaaaaaactttgcagaaagccaacatgtgactctcaaaaacaagaaaattgacgatcgccttataaggaaaggcgcatcgcacgaaaacctcaccgtccttcaaggcctcccggccactcgcgaacgagcggacgatgaactggcaatcattgactataaagaagtagtacaaatacgctcttgagttctcaaaccaccaccgctcacccgcctcgaggcaccccaaccggggaaccactcgccgagcggcagcaagagataaacctacagcacaatcccattccacgcaaatcgggcatgacgaaacaagacgcgaacccttgcaaacactggaaagcgccggcgtgtcgaaaacacgggaaaaacgggctgcggacgccatcgcgtagcgaaagaccgtcggaaaaaccctgaaacacctcaccgcaaaccaacatccgggcgtgtcgcaaccacactatccgcttacagccaatcccttaagccggcccatccgagaaaacctcccagctgaaagctgaaataggagaaacagaagaaagcagataaacggaaccgcacccggatcgttggtctgaacacattcagatctcaactgactggaagtgcggtttcccacatgcgcagacgcagacgacggcagaataaagcaacgcaaccggaatccgatcaatcggcgcaaccgaaacggtagagggcccaaccctggccgtattgcgaataatcggcaaccttcaccaacgtgccgccatccacatacgcatcaatcaattcctcattatggaaggaatcgtactgggcgcgatacgggaatgactgcagactctgcgcctggtcgcccatcgtaaggaagtattccggagcgtcggtcagcggacataccgtgccgagcacctgctgcgcatcgccggaagcgaacgcggtctccactttgccgaacggagcggatggcacatcggtgcgcgcattgatgatcggatacaacatgttcgcgttgaacagcgtctccgcatacatcgaaccgttcaacggatcggaaatgatggtagcctgggtgcccgtacgtttcgtgaccttgcgcagcacagcgatcttttgctcggtgagctgctcgttggggtcgctttggttcagactggaatgcgcgatgatcgtgtcgcgagccgcggaacgcgatgggcatacgatctgcgcggaaaccgcaagtatcgcaatcacaaggaatacggcgattaggacgatccaattggaagcgaaagaagcgttcttcacggaagaaacagcagacgcagaagaaagggaaggaacggaagaagcactattcttcgtggaaaaggaagatgcagaaggagcgaaagaagcggatgcggcgcacgcggaaacgcattcggcaagagcgttgattccaatgacaagcagcggcagcgcgaccagcggaagcatggtcataatacggttttcatcgcgataccacggagcgctgatgatattcggcaacgcgccgaccagcgtaaccgtgcacacatacaccagcgcgaccagcaggaatgcggccgtcaacgcaatcacgtcacgcaggcgatcgttgcgacgaagtcgagatgattcggacgacgcggacgcggcatcagtggcgttggagtgcgacgcaggtggcggacaggaaacggaaaccggggaatcagcagcggaaaccgcaatatcagaagtcgaagcatcaacatcgacatcagcagaagccacgggaaccacagtggaagcagccgacgaaaacgaatccgaagcacgcgcagccgcgcggcgggaagcacaaacgaaagcagccgcagttcccgcaatcagcaacagtgcgaacagaatcgcaggaaaaccgtcaagcccatccgtgagacagaacgaaatcgactcccacaaattcttggacggctgatggctatggaaccaggaatcgggattcgcccaacggtccgatttgaacgacgtaagcatcaacgccacaaacgccaccgcaccgacgcacatggcaatgaacgcgccaagaatcagcttccacggcaagcgcagcacaatgaacggcaccaaaatcagagcatacgtgaatgcgatacgcgggtgcgcaaccaagcaaaccacgcctgcgacagcagtgatcgcaagccattttgctatatgctcgcgcgcggcgatcgcatcgaacaagcgcaatgtggcggcgatgaggaacggcagcagcgacatggcgaaaccgaatgcgatcagcggaccggcattcagcagcccgtacgggtggcacaccgagctgacggcaagcaccggcacgaacaatccaatcagattctgcagaacgaaagtagcgtcggaagcagcgtcatattgccgattgccggctgacgggacctgctgattcgagatattcgacgattcagatacggacgacgattcagacgtagacaatgcttgagaaatacgtgaaattggattggaaattggattaccgcgattccaacgttgcaggaaatacctgcataataccagcattccggcagggaaaatcacgcccgaagcaatgatccacgtgatattgaatgcctcgtagatcgaacattgcacgccgaacagcaccgcgatcttaatcacaaggtaagcacagacgtgaaacaacggcggataaaacgaatcatgcggccacaaatgcagagccgcccccaatccctcgtcaagcagacggtgaatgaaatagtaatgcgcgggggcatcgctgctgacgatcggcgtattccacaccgtggaggggaaccacgcaatcaccaggcatagtgcggacgcaatgccgataatcgacataagccacggcaataacgcgcggagcgacaccggacgcagcatcgcgtggcaccgctgcaggccatgtttccgcccggacggaccgcccttggccgaatcattcctggctggaccattcgtagccgaaccatccttggccgagccattctgccgagcctgagtctgcacataagcctgcacatgagttcgcgcacgagcctgagccgagccacaatcgcccgacacggaaccggtattcgtaatctgttcggaagtcatcgattccatcgtagcgagtgccgcaaccatgctcaacgcttattctctggaatcacttttcaggaatcattcagacttcatgcaggggtataacagtgttgcgcaagaaaacaatcacgttggaagcccaagatgattgcacgggacgcatcatgcgctacgggcctgccttgctgcggagcgcgcgtcccggccaacgctgacgtcggcatgcgccggcgcgctataacagagaactggagaagtaccgcatgttcgttctcaagaacgcatgggcggcgcttggtcgcgtcaaatggcgcaccgcgctgatcgccctactcgcactactggtgtctttctcggctgccgtggacttggcagtgattcgagccgacgacaccgccaataatgaaacataccagtcgcaaaaagccacggcggtgattcgtccgaacgcgcaaacacaagccaagcgcgacggtgccgattccagctataccgacaagtacttgacgtgggaaaagtacagcacgtatgcaacggccgcacagagcaacaacgtgaccttcaattacacgttggcaacatcggtgccggtgcgcgaaagcaagtcgttgcaggcgatcgccgcgaaaaacgacaccagcgaagacaagaccggcggcaacctgaccctgcaggcgttctacacgttagacgctgcgaagctcaacgactacggctattacaaggtagtcaagggcaagcatctggcctataagacgcaaagcgacggcgtactcatttcgcaggcgctagccgataagaacaatctcaaggtcggcgacaaggtgacggtcggcaatccgtcgaaggcttccgaaacgtacacattcaccgtgcgcggcatttacgaatatgacagcgacgtgcctgagggcaacggttccgacgcaaaatacgcgaaggacaatcgtgaaaacgtgatctacacgacgtatctcaacttcgccaagaacgggcttgacacgacggaggccacaggatggggcgttccgaatctcaatatcgtgttctcgctggcgaatccttccacgtacaacaagttcgtgcgcgcggtgaagaaggccaagttggacacgaagacatacgagatcacctcgccgtcgcttaccgcctataagaagtcgattgagccgcttgattccgccgcttcggccgcgcgcatcgtgctgttggccgtgacgatcgtcggcggaatcgcgttgctggcattgattgtgtgggcggcagtcggcggtcgtcgcgacgagatcggcatggcgatgatcaccggcgtgaccaagggccgtttgggatggcagttcatgctggaaacgttcatgatgacggttccgggttggatcatcggtttggttgccggcgcgctattggcgaagccgatcggcaccgcgtgggccggcgggcagactgtggcgatcacgtccgcttcagtatggaatgtgatctggtgcggcttgggcgcatgcctggcgcttggcatcgtggcgttcgtgcgcgtggcctgcttcaacttgaaccaactgtttgaggaacgctcggaggtgacggcatgagcgacaatatgaatgataagaacgaaaacatcgacgagaccgtggttgatgagaccgtggttgacgagaccgctgaagccgaggcaagcgagaccgtcgatgatactgcgatcggcgatattgcagatgacgcatcttccgcagattccattgaatccatcgattttacggtgatgtacgacgatgacaatgcaaatatcgaaattgcggcgaatgacgatgctgcgacttccgacgatgcaaacgacggcgacactgcagcggctgcaggcaacaatactgcagatgccgacgaaaccgccgacgctgcaaatgacgttgcggataccgaggatgacgattcggacgtggtggcggataacgcgaatcaagtgaaggaaacgctcgctttgagttcttccgatgaaccgaccgcactggaatcgcatgaaacggtgaaggccgattccgtgaccagcgtttcgtcacagctcgacaatgaaatcaagcgcaatcgcaaaaaggatgcgttcttcttcaaaacgaatccgacattcgcgctcgatcatgtgaccgtgaccaatcgcaagaccggccgcaatattcttgacgacctgtcgttgtcgttccatgcaggctccacgcatgcggtgcttgtggacgcggaggatcgcgaacagcatcaggcattgctggccaccatggtcggcatggtgcgcacggaccgcggcaatgtgatgcacaaaagcgccaacctgagcgacaccgaaccggtcgaagtgttgggacaccgcatcggattcattccgcaacgtttcgctttccgccccgatctcgacgcggaaagcaatgtgctctacgccatggatgcatcgaaccgcaacttcctcaagccgaagcctgtgatcgcccgcgaactgctcaagcgcgtaggcttcgacgaggtgacgtccggcctggcagtcggcgaagtaagcgaactgaaccagcgtcgcgtggccatcgctcgtgcgctaagctgcgaggctgaggtgattatcgccgacgagccgaccgctggattgaatgccaacgatgcggccgtggtgttggatctgttgaagaagttcaagcgcgatgccgatcgcaagcgcgccatcatcgtggtgaccaccaatccggaggtcgccgatgcgatggagcacagcgtggaactcgactagccgcctagtgcaacgggcgcgcgaacatagactctttcgcgcgcccataggtaagccctttggaattctggttttagccaaatcccaaagggcttacgtgttctaaaagcggtctgctctactccgcgatacgcatgtggtactgctcggcaagtggcgtgacgtcaagcacgccgtatcgttcgagcagccgcagccattcgcgcctgttgctttcgccgaaacgggccgctttgcgcgcataggcttcggccgtcaggaacttcggcggaatcgacttgctgttgtacttgtcggccaccatcaccacttcctgctcaagattcatgggcacatagtcggccggaggcaatggcaatccttgcgattccaccgcttctttggtgagtcccacaccggtgtggttgcgcgcgaactgcgcgatagactcgtcaacaccctcattcaacaaatattcgtagcctttaagcccatgccgcacgtaattcggaccgtcgaatttcagcggtccaccgtcggagccgtcttgcttgagcagaaaatacgtgccgatatcatgcagcagaccaccgatcaccaccagatgctcgtcgatcagcctcggcggaacggtcccgcccgtaagcccgtccgatgatggaatggaggggatgcgaagcatgccgaacgattcgcttccattgccgtcttgcgtaagcctaaggccgaaatcgcccgctttttcaggggcatcgtccggtagtgtgcagcggcgggtgaacagtgcattctgcctgcgtgccatgcgacgtgcgatgtcggcgacgactacgcaatgtccgtgaatcaaatcgtatgcggcttgcgattgcgcgatttttcgatgcagttcgtcaacttgggcgagtgtaggaatatatccggttgtcataccgcctatcttaggcgctgtatgacgattgccgcatgctgaatccggtcgaaaaaatgtccggaaatcccagatggaaatcccagatgaaaattacagtcgaaaattcccaaatacggatttcagattacggatttcagatggaacgcacgcgaaatgcgccggtacggttggaagcgacaatcatccgatcgttttccaaacgagtccagccatcttcggcacgctgatcgaaaccggagctggccacaaccacgcccttcggctggcctgcagcctgatccgcttcggattcgccgagcgcacgatagcgcatcacacgatagtcatgcgcctgatcgccacgtccgtactggtcgtagatttccacaatgcgcttggacgtgacctcacgaccggccgcgcacagagcgatgaactggtcttggctctgaatcatgcagttgtagctggattttggatagcttttgcgcagttcgcgcacagcctgcgcgaccgcctcgtcgagcgcgaagccaaaaccgatgtactgcagaatcactgcgaagaaaatggcggaatcggaacggccaccggtggactgcacgatattcggatcgactgggaacgcacggttggtgatgatgttgcgaccctgatcgtcggaaatatcgccattgtggatgaagctcaatccgttggcgtagaacggctgctggttttcgagaatcagcggcaggttcgagctggccaaacgtaggtgccacaggcctccacgggccggagcgttggcgagctcgtcgaaaatcggatcatggcgggccgcgaccgtgttcttgtagatggtggtgccggtttccggagtgggagcgccaccgtcacgcaggtacggcgactcgctcggcacggtgaccagcgcggagccccagccatcgttgtggatttcactcagattacggaaatcgcgtacggtctgcatgccgagcacaccattgagactggtgttgcttccggctgccgcgaatccaagtaatctgcacatggttgattactctacagggcttgtgctgcaacgcgcgcatatggctatcgacattgcttatagcgtgcaagaaaccgcgggattccaacgattcttcgcgataagaccgtgcaaaaacctacaaaatgccctacgaaaacgggctgcgcgacgatggcggatgcaatcaccatcatcgcgcagcccatttcacggcttgtttcacacacgctttagccgcggaggacgctgagtcgcgaggaacagcggctgtatctcaatcagcggattgtaaggcgcaaggccgaaccatttgaccggagatcccgcaagacgacgaatcgcatacttgatttccaaagaaatcgcgccacgctgcgataccttcgactcaggcataagcgccttgtgtatcagcacatatcgaatcggaccgatattcggatcagcatcaagcttcggataacggctttcctgcttcggcagatctcccgacttcgacaaatcgttcatgatctgatgaatgtaagccggaatcgactgagaaaccttgaaaccaagccgaatgcgaacacggaacatgtaatccgtgccgaaattctcaaccgaatactcgcgggtgaacggctcatcagcggtctcgacggaaaccgcccaccaagcgcgggcacgttttggatggtcggcgaaaatcgagaagaagatatcggtatcgatacgcttcatctccggatccgacgtgaggtaaacgatattgtcggcaaaatatggaatcgtatcgtcatcatgcagccgctccagtaccggcaggcactcggcgggctgcatatgacgacgctgcgcacgttccagcttcgtgccttcgttccacgtgtacatgaccagcagaatcgcgaaggtaagcagcattgtgaaccagccaccatgcaggaacttcgccatggaagcgaagaaaaacatgaactgaatcgcaaggaacaacacggtgaatacggccgctccgatacgacgccctgaatgccagatgtagacggcaagcagaatggtggtggtgatcatggtgatggtcaacgccaggccatacgccgcggaaatatgctcggaatcacggaatagcgccaaaaccaacagcgtggaaacgcaaagcaccacattgaccacaggaatgtacagctgaccgcgggtacgggccggataacggacctgaagatgcggcatccagttcagatgggtggcttcagacaccatcgtgaacgcgccggtgatcaatgcctgcgaggcgataacgcctgcgagcacggaaagcacgacggccacgtaacgcacgctgggcgtcatcatttcgaagaacgggttcaaaccgtgcgtgcgggcataagccgaatcatcccaatgattgagcatccatgcgccttggccgaaataacagagcacaagcgcgattttgatgaacggccacgtgaaatagatgttgccacggccaacgtgacccatgtcggaataaagcgcttcggcaccggtggttgacaggaacaccgtacccatgatggcaagaccagcggcattatggctgctgaacaggaatctgacaccgtacacggggttgagcgctgcgaacacgccccaatactgactgaggttcgccaagccgacaaccgctaggaacgagaaccagacaagcacgaccgaaccgaacaccttgccgatacgctcggtgccacgcgactgcgcagagaacagtatcagaatgatggccgcggtgatcatcagggtcagctgcttgttttcggtaaaaagtttttcaaaagccggtagtgtttccaagccttccactgccgagctgatggacacggctggggtgagcacggaatcggcgaggaacgcggcaccgccgagcatggcgggaatcgcaagccatgcaccgtactttcggatcaacgagtacagcgcgaaaatgccgccttcgcccttgttatcgatgcgcatggcaatcagcacgtatttgacagtggtgatgagtgtgattgaccagaacaccaacgaaagcacgccgagcacggcctcgtggtcagcgtgcgcgagtccgccctgtccgttgaggaacgtctgcatggtgtacagcggcgaggtgccgatatcgccatataccacgcccaacgccacgatcgccatggcaggcgtgattttgtttggcccggattgcagacggctccaccagcggccgatgggacctttgctggccacctggtcaagtttggcggcctcctgctgcttctcctcgtgctgcttgatcagctcctgtcgctcttccttggtcagcaccttgtgcgaaaccttcggcgcctgcgtgtatgtggctgcgtgaaacagcggctcatcctcgttaggctcgttagccataacgctacctccaagtggcgggccttccaacccactccccaaaataaacgcaaaaaggcacgttaggagccttacgaagtcttgtcaaatcttcacattgtttcttgcgattcttgatctcgaaagaagtaaacttcctgtgggttttttccctcgtttttctcttattctctctcattttcggacaaatcgtttccgctttgccgattttcggaatttgttcagattccgtacacttcgcgcgtagtctttcgcgttgcctgcgcgacttccgtcagcggtttatcgagataattcgccaacgactgcagggtgtaggggatcatgtacggcgcgttggtgcggccacgatacggcatcggacttaggtagggggcatcggtttcgaccatgacatgactgagcccgacaatgcgtgccgactcgcggataccatcgttgcccttatagctggatgtgcccgaaagactgagataccaaccgttttcgcgcgctatctcacccatttcggcatcaccggaatagctgtggaacacggtccgttcgggagcgccgtccgccagcagcgtttcgatgacttccttatgcgagtcacggtcatggatctgcatgggcaggttcagttctttcgcgagcgcgatgtgcgcgcggaaggcttcccgctggagttctttggcggcttctccggtgcggaagaggtccatgcctgtctcgccgatggccacaacctgattggggtaggtgatggcaagacggtgtacttcggccatggcgtcttcgaagttggtgtcgtgccagggtttgtatttgagcggaaggccgtctggtccgggcactccgcgatgaccgtggagcacggattcgttgggatgtatggcgatggccgcgtgcacggtttgggggtgttcacgtgccatgtcgatggcggtcatgaggttcggtagttcgcatccgcagtcgatgacgccttcgacgccgacttgttgtgcttggttcagcagctcgtcgacgctgtatacggggacttccggttggcctttttcttgggcttcatggctcatggcccgcgagaacggcacgacggacgccacatgggtgtggttgtcgatgacgtgcgcgttctcgggaagtggttgcggtgctggcgcccagctgcggtcacgatggtgtttgctcatgcctccagcctacgctcgatggcggtcttgcttcggaagccgcgttattcatcgatggcagtgggattaaccaatgcatctctatatgttttgcggcgtagcgctgaaacgctttccgcgatcagccacggagggtgagggtggtgaaggaccaggcgggggcggtgtaggtgccgctggtcaggtcgagcgtggtttcgaccggaacggttggcgaggccttgccgatttcacctgcgtacgggtcggttccggcaagcacggtggcggttgccgaagcgcgggattccacggaaacaccaagctcttcaagcacttggttcagatcaatctcggcttcagcgtcgagcgcgttgacgatacgcacgtaggtgatgccttcggcatcgttgcgagccacggtgacggtacgacgaggctcttccggctcctcaacgccctgtgcgacaagctttccatcgatgtagagcttcatgctttcgccgcgatcggccacttcgatgcgcacctgccatacggttccggggaacacttcgtccatggaccattcggtgccgtcgagattgtaggcggtgccgtcgcgcaccaccttgatttcgaaggcacgaccaaacgatgtgatgttgtggttcttgccgttgacatcgccatgcaccagctgcaagccccagcgtccctgataataggtgatggtggcgttgatggcgtaggcgtcggcctcgatgttcaggcccgtgtccatagggccattgcccatgtaatggcggtcttcaagatcgatatggctaccatcggcggtgtcgacgctgaagttggtgatgtcagcgtgggcggcaccctccaaacgcagaccgacggttgacggcagttcgcggcgcagcgtggtcgggccatccaccgcaaccggccatgcggtatcggacgtggtggtggcatacatctgctgcacccagtaactgtacggcaggtaggtacgctcgttgtcgaagtagatcaggtcgggattccagctgtgatgcccgttcttggcgaacagcggggcatacgacgacatgaccacggcatcgccgttcaattccatgcgtcccatgaaggacgcttcggaaagaccattgatcagctgcgtgttccacgaaccatattcgcccaagtacaccttcgggccttcgcgatccgtggcgtcatagtggtcgagattgtggaaccaccagctggaagactggtaagaatgctcgtcgacgatgggaatgcccgcttcgcgcgcgtactgccagccggcttcatagtctgggccgctcggagccgggccgaccgtaccgacgacgacgatatccgggtaggcggctttgacagcgtcgaagatctgctggaaacggttcctgaacacgtcatcgatgagatcctcgttgccgatgcccaaatattcaaggttgaacggttccggatgacccatggcggcacgcttggcaccccattcggtggttgcggcgtcgccattgcagaattcgaccaaatgcagcacttcatcgatgtatgccggcatgtctttctgcgcgatcggcaccggaccctgactggtgttctggcagctcacggcagcgggcagcaccggtagcggcttcgcgccaatggtttcgcacaggcacaaatactcgtagtagccgatacggaacgactggtggtagccccacaggttgaaattgtgcggccgatgctcaacatcaccgatggtgcgatcccagtggtacatgttatccatgccaagaccgtgggtgatgcagccgcccgggaagcgcatgaagcgcggctgcagatcggcgagcgccttgaccaaatcgggacggaaatgcttgagcccgttgtaggtggtgcgtggttcgagggtaacgaaatcaagatcgacggtaccttccgtggtgaaggtgagtcgcaaagcgccttcgtgcacaacgatggcattgctttcaccggaaaccgtcagcgaaacctcttgcttacgccaatcgttggaatcgacggtgatatcttgttctgcaatcgcatttccatcgtcgtcaatcagagcgacggtgacgggaagtgcggaagcttcgcaattgctggaaatacgcatccatgcggagaaatcgtaggtttcgccggcacggaagaccatgccgtcccagccgatattttcaagcgaagccggcgcctgttcgacttcgacggacgcatagtgcgggttttcttcggctaccggattgtcggtgagcacgtcgaaggctgcgaaggagccggcgggcacgattttgcaccagaagctgtagttgctccaatcggcggaatcggagcggttgtattcgaaggcaccgttctgcacgaggtctgcgttgagaccgccgtcgccggaatagctgatgtcttcgaagaagatgccccacaggtcggtgctgatggcacgcacgcccgctttgttgagggttgcgatgagtttatcggtcatggtgtgtccttggatggtgttggttgtttgttgggttggatggtgttgcggtacgtgcgattggttgcgattcggcgtctgtctggcaccgtttcgccgccggtcgaccgccggccgactcagtcgagcgcaaaccagaggcagccgtgcgcggggatggtgccgcggatcacgcggtcctcgccttcgccttcgatgcggatgtccggatggacgccgtcgggcgattgcggggcgtcgacccacaggtcggtgagcgtccagtccgcgttgcgttggtcgatgccgacgaagctttgcagttggatgttgcctttgagctcgtacggctcgctgccggtccagaagatcgcgccgtagtggccgcgcgcatgcgccgacgtggtgccgtcggcccagtccgccgcgtcggcggtccatacgatgagctcgccgatgaaggattcctccacgttccattcggcaaacaatcgttccctgatgatttcgcggttgtcggatgatccggcggtcacctcgcgcagggccgggttggcgagcagcgcgatggtgtcggcgctgctggtgggcaggtcgccgccgaccatcagcggggatcggcccatgctccacagggtgagcagcgttttctgttcatcgcaggtcagtttcgattggcggtcgtcgccgcgttcggcacgcaggccgatgtgtccgagaggcagcatgtcggcgtcggcccaatgaccggtgcgctgcatcggcgcccatcgggcgagtcggggaaactgctggtagatgtcctcccagcggtcccagaggtcgtcggagatgcgccacatctgcgagacgccgcacaggaaatcgacgtgggtgctggccacccagccgcccggggacagcgatagcgtgatctgccggccgtacgtggtctccgcgcgttcgacggcgtggtggtaggcctcgatctcctccgggaagaacggcgtctgcatgtcgtcgatcttgaggaaatcgagtccccaagagacgagcagatcgacctgcgcgtcataccaggcctgcgcgccgacgttgccgcgcttgagaccgtagttgtcatggttccacgcgcagacgtgctcggtgtcggccacgtcccgcgcgtgcagcgcggtgcctttgaccggcaggttctcgtgcacggcctgtcgcgggatgccgcgcatcacgtgcacgccgagcttcaggccgagtcggtgcaccgcatcggcgagcgggccgaatcccttgccgccggccgcgctcgggaagcgctgctcatcgggaatctggcgaccgtacccatcgatgcacagcgaactgccgtcggaatagccgtgcgcgtgggcgttggggtcgaaccaacccgcatcgatgaccagggtgtcccagccggcgtccttgaggtggtcggctatgaagcgcgcgttggccagaacctcccgctcggtgacggtggtgccataggaatcccagctgttccagcccataggcggtcgccatgctttcggcaaatcatcggtaatcgccattggcctctccttatacaacgttagaaaagcgtttcgtcctgcagtacatgccgtcatccttgacttatacgatcagctgatttgctacagaacttcgatatgtaccgttacatattttatagcatatttcagcaatcgcaatccactttgcaatatcggtgattctttgaaatttcacgatttctcaagaatcatcatatataataccgttacataaaatacaggtattgaaggagtggtgcatggcaagcggcaaaccgacattgcgcgacgtggcggcggaagccggcgtctcccccatgaccgcatcgaacgcactgcgcggcaaggcgggcgtcaaggaatcgacgcgggccaaagtgctgacggcggcgagaaaactcgactaccgcatcaatcttacggccagcatgctcaaatcggggcgcagcaacatcattcacatcatcgtcaacgaattcgattcaccgttctattcgaagctgacgcaaacattgagccgcgaaatcacttcacgcggactcacgccgttcatcgaacagacccagtattcgccggacgccgccgaacatgcgctgagcagcaatccattctccgggcagctcttcgacggcgagatcctgcacgccaccggattgggcacgaatctgccgctcgccaaactcaacggcggccgcccgttggtgctgcttgacgcatgcgaggagacgccgaccgtggacgccgtgaacttccccaacgaggagggcgaacgtgcggccgtacagcatctcatcgaccaaggatgcagcagcatcgcgatcgtcgggcaccgattcgcgccgcgcgccgaactgacgcacgcccagaacgcgttcgcattgcgccttcgaggcgcatgcgccgcgctgatggacgcagggcttccctacaacgaaaccgtggtgttcgaaggcggatgctccaacgacggcatcaccgccggccatgcgatcgcggaacggatcatggcggcacgggccgaaaatggagtttccaacgtaggtaccgaaagcgcaagcatggctggggccgatgattgcaacgatgcaagtggcgtggtcgcggcaggctcggccggatcggctgatagaaccccctcaattgcgttcgacggagtgtgctgtgccaacgatttcgccgcattcggcgtgatccgcgggcttgccgattacggcatccgtgtaccgcaagacgtgaaggtgatcggattcgacggcgtcacatccggatcctatgccacaccctcattgagcaccatccaagtggatctcaatcagctcgccaaattcgcgatcgacatgatcgtcgaacgcatcgaggatggcgactccacgccgccgagccgcgcaaccatcggctggcaactcgtcaagcgcgaatccacggcaaacagcctcgaactcgactaaacatttcaggccacgcacaggccccaatcacatgtcaatcaacattatccaaggaggaaccatgcccaccccacgcaccgaagcgtatctgttcgtgcatttcatcggagaggaacgcacgccgaccgacgagcagctgtatttcgcgctcagccgcgacggcgcgcattggcacgatctgcgccccgccggcaagcctgcgctcgaatggctcggcggcgaaaagggcacgcgagatccgcatatcgtacgcgatccacgcggtggattccatattgtggccaccgatctgagcatctaccatcgtggcggatgggggccaaacgatggcgcgaccaccaacggttcgactggactggtgatctgggactcccccgacctaacgcattggagcgaaccacgtttggtggacgtggcgtcaaagattccgggcgcgggcatggcatgggcgccggaagcgaactgggatccagatcgcgagcagtggatcgtattctggtccaccaagtcgaatgtccatgaagacggcaatccactgtgcaacgaattgggcgacgaaaccaatgtgtattacgccacaacccgcgatttcgtaacgttcagcgatccggtcaagtggatcgaccgcagcaatgtggtgatcgattcgaccatgctgcgcgatgatgacggttggtggtatcgcgcttccaaggattctgaaatcaccatcgaacgcacgcgcaatccgtacgcggtcacgtacgaagcgctgcgcaccgacgatgaaaacgaatggtcgtacgtcggaacgcttaccgacattttcggcaacggccgctactcctggcactatttggagggaccggaattgttccgttacaacgatgcggacgtacatgaggcgaacggccggaagatgccgttcggcctgatgtgcgatcagttcgcggaatcgaagggatacctgccgttccgcagtgccgacttgagttcgcgagagcccgtcgattggcagcgtgccgacgatattgatttcggcacgctgaagaagcgtcacggcgcgattctgccgatcaccgcggcggaatacgatgccgtggaagccgctttcgccctgtgatcacggcatagcagcccagcttaggcacggcggcgaatcgcgaagattcgggcggagggacgcttggacgtggttgcgttcagacggaccgtttccggatccatgcgttcgatagtccacggtttggcattgggcgcatggtccggttcggcaggattcgggaacacctgttcgatggtttgatccgcatccaacggcatgttcacggacggtgtgccgccgcgacgccacacgatgatgtagtcgggcttatcttccggctgaggttgctgatcgttctgctcggcagcctgctcattccaagcggattcgccgtacacatacgcgtcacgcatatccgtttcgacatgacgcaagccgacggcaagccaatcgccgtcgaagtcgggaagtccggatggccagaacggcaccatatgttgctggtcggcaagtacacaacgatgtaaggcgatagcgtcgcgaacgagcgaaagacgcggctccgtcatgcgatcgatgaaaccagacagatacagcctgccgagcacacccgtagcaagcgtgaacacagcagtctcatcatccatctcttgctgagcgtaaccccaattaccctgctgttccggcagaatcgtcatacctgcaccagccgcaatcgcagcataaatcagaggatcgcactggtcggaagtggactgcaaatccaagcgggacaactgcgcgtaatcggcgcgcatggcaccggaaccgcagttttcgatcatcacttccggatggcggcggcgcagatcgtcaagccactccaaatatgcgcggcaatgctcgagcaggccatcgccaacggactcggcattcaaatcagtgccgacgccgggaatggtgttgtagtcgaacttgaagaacaccgcaccgaaatcgtcaatcaaacgatcaacagtacgcgtaacatgctctcgcgcttcgggagaacggaaatcaagcagataacgacccgaatcgcacacgcgcacaccatgacgctggaagaacgcggaatccggcaacgtgctcgcaagcggcgatttcacgccgatcacttcaggttcgagccacagtcccaagcccatgccatgagcacgaatcgtgtcggcaagaccgcgcagaccggcgtcgccgaaacggttggtggaggcctgccattcgccgaccatgtcccaccagccgccgtcggtgctgtcgtaccagccggcgtcaatgcagaaaacatccgcgccaacgcttgccgcaccttcaatcagcggcagttccttctcaatacgagggtcaccgaacagcgtattcatgtaatcgttgtagatcacgagaccctgcgtatgctcgaactgatcgacgcgccccaactcacgagccttggcaatgcgcagcgcacgacgctgcaacgtcatttcggcaacagcctgctgccaatcgcctgcggcaatggcaaacgacacaggaacggactcgaaatcattgccttcaccaagattggtgaaccaaccatgatccttatattccggaccgaacgcagtgacgtgcagaccgggatcgtcctcgccgacttcccactcccacggaccgttatgctcgatctgccacattacggaaaaatcgcgggcgcggcgtaccgaaccttccacctgcagaatgccggccggctcatgctctcccgagctccatgtagaagtcgagctcatggcaaaacgcgaactagactgaccaggattgattttctggttgcggttacgcacctgagtgtcacgcagcggacgaacacgccaatcgttttccacagcccaagcggcatcgccccagaaaatattcgaacgatgcaccttgccgcagttgacgcgcatcggaacggtcagattcaacgacgacaccgcttcaatcggcagttgcttggcggactgcagacgcgtgtaggtgcgcactgcggaaagattcgggaacgcctcgaatacggaagtgaccaccaagcctgcattggaatcggcggaaaccgcctcggacgcggaattcgcggcggaatcggctgcgtcacgttcgcttgccgtcggctcgaattcacgacctttcggttcaagatcggcatacggcgcgaactgcgtgatctccaaacggaacggatcggcggaacctggttcaggttcggaagcaagcgcggaaacgaatcgcaattggctgccggcaactgtggcaatcagcgtcagtcggttgtcttgcgaaccggtattggcggcacacacctcaacaatcggacgcggatccttttcaaccactggctttccatcgtcagacaagcgaccatcgatcggaaccatgttgcgccctacaacgttgcagaggcgaacgggggaatcggcggcaatgtcaaacagcatagagaccacaccattgccccattcaaggcgcccatcctgccgaggaacaaggggagtcatattgccgttctccattgccatctccttcgaattccgaatgccgcctatccattgacgtgcatcgtttgacgtaccctcactagcttaagtggaaaacggggcaaccgcgacgtgcgtgtctacgcacattcagcaaatattcagcaactgaaatgaccgttcaaagaccagcaaatacctactcgaattgcagatattccacgaattgaatcggcatatccttggattccgtaatattgctgaatccgagaataaccccttctttcggcaatcccttcatggaagtccatgttttcgaatgggacaagtcgaatccaacagcgtcgttcacatcggaaaccggattgcctttggcgtcgaccagcgcatccttgacctgctcaagatcggcggcactcatcacttccgcgggtttggtgatgtcgccgcgatcattgacttcggcgaaaatatcggtttcggcaacaatcatgttgatctgacctgccgaaacgcgagccgtcaacgatgcggaaccatcttgcgcggcattctcgccaatcgcaatggaggcatccgtccgcacgagacgctcgtcttcaataccttgcgtcttcacaaaatcagcgcccaacgcatcaatctgttcggaatattccgccatatcgacaccttcaagactcagctcggcctcgggacctttggtcacatacgaaatgacgaaagcaagtaccaagccgaccactgcgataatgatcagcacatcggtcagaaagttctgcttgaagtacggccacttgtctttcggcggcagctcgcggaaggttttgaatttcgtttgcttcgcatacacgttggtggatgcgagcgctgcgaccgcatcttgctgctcctgggtgagaactggcttctctactgccataccaaaccttcccgcattgtttcatcgacgcattcacgcgtcatcttcgtgcgcagcaacatgcgttgctttctaacttccctatcttccgcctcgtacctgataatttgcggctagccgccggccgaaaaacgacaagcggctagcaggaaggctgtttttaagccaatcagcctttcaagccaatcagcccaagccctaatcagcccatttagaccttgatcatggcgtattgggagtcgtagaggcgataataggcaccacgcttggcaagcagctcggcgtggttgccttgttctacgatctgcccatggtcgatgtagcagatcatgtccgcgttctcgatggtggacagtcggtgcgcgatgatgaagctcgtgcgtcccttcagcaggtggttcaatccggcctgaagtgcctcttcggtacgcgtatcgatattcgacgtggcctcgtcgagaatcagaatgcgcggatcggccagcagcacgcgggcgaatgcaatcagctgacgttgaccagcggaaagcgtggaaccgcgctcctccaccaccgtgtcgtatccgttcggcaaatccatgatgaactcgtgcgcatgcaccgccttcgcggccgcttcgatctcggcatcggtcgcatccaacttgccgtagcgaatgttctcgcgcacattgccggagaaaatgaacgtatcttgcagcatgacgcccatctgccgacgcaacgattccaacgtgaccgaacgcacgtcatgcccatcaatcgtcaccgacccttctgcaacgtcgtaaaaacgcgacagcagattgataatcgtggttttgccggcaccggtcggaccaaccaacgcaacagtactgcctggttcaacatgcagatcgaccagattgagaatattacggccgtcaggctcgtaacggaagatgacatcgttgaaatcgacgcgaccttcgatttgcggcagttcagtcgcgtcaggcgcattgcggatctccggctgcacatcaagcgtttcgaaaatgcgctccaaatatgcggaacaagtgatcagctgattgtagaaattgccgatgctgatcaccggattccagaaattattcgcatagccgacgaacgcgatcagcacgccggtggaaacgttcaccgcgccgaagcccgtgacgcccacatagtagatgaacgcgatcgtcatgacggaaatggtttgaatgcccggccacatgaggaactggatgtgcacggccttcatccacgaagtgcgcacgtcgttctgctgctcctggaaggttttgaactgcgccgcctcctgagcgaaggtctgcgtggttttcacgccggcgatcgactcgtgaatgaacgcgttgagattgctctgcttgttcgacaacacctgatacgcgcggcgctggaaatgctgcaataccagcacccacgcgatcaggaacgggaagagcaccaggctgaacagcgcaagccgccaatcgaccacaaacatgaccaccaaggtgatcaggaacgtgaacacgtcggaaatcacattgatcaggccggaactcaacgtgtcggaaagcgtgttcacataattgaccacgcgaatcaggattttgccgtgcggacgcgaatcgaaatagctgaacggcagcgtctgaatatgcgtaaaaatatcgcggcgcatgtctttcaacatgagctgaccgacgcgagtaatttcgacggtacgataacgcaatccaaactcataaatcacaataagtacggccatcaaccccgttaattcaccaagtaaggtgagatttttcgaaggaatcgcgctgtcaatcatgattttcgtcaaatatggcacgactaccgcaatgcagctcatcatgacgacgacggcaagaatgcgtatgattcgcgacatatacggctttacatagacgccgatacgcagaatatcatgcaggttgatctgttcttccagctcttcatcttcgcggtatgtgttacgttttgccatgggttttccccctttcctgccttcccgcgcctacgcttcgaaaccttgcgaacgacccgcctgcaagccgagctgcttgtagtagatctcccaatatcggccgtgcgcggccaccagttcgtcatgcgtgccgcgctccacaatgcggccatgctcaagcacgaggatcagatcggaatctttcaccgatgaaatacgatgtgcgatggtgacgatggttttctgttcgtccagttcgcgcagatggcgctggatttccgcttccgtttccatgtcgacggcgctggtcgtatcgtccatgatgaggatcgacggattgtcggcgagcgcgcgtgcgaggctcaggcgctgtttttggccgccggaaaggccgacgccacgctctccgaccacggtatcgtagccttccggcatgctgcggatgaagccgtccgcgccggcgatggtggccatgcggcgaatgtactgttcgtcgtattcgcgttgttcgcccgcgccgaagctgatgttgccgccgatggtgtcggagaacaggaacgtgtcttgcgccacgacgcacacttgcgagcgcagtgtggcgagcggccagtctcgcgcgtcgacgccgtcgatgagcacatggccttcggtggggtcgtagaagcgggagatgaggttgacgagggtggatttgcccgcgccggtttcgccgagaatgccgagtttggcgcctgccggaacatggaagtcgacgtcttcgagcacgagggtgtctggttcgtcggggaaggcgaagctgacatgctggaagtcgatgctgcctgcgatgcgggttgtgttggttgttgcagcggttgcagccgctgtgctggcgtgattcgcgtcggcgctgtctcccggtttttccgtattttccggcttttccgtaatacgtgactgagcggtgagcagtttgcggattttgatgcaggatgcgttgaatcgctgccagtcgttgatcagccatccggattggcgtaccggcccgtcgatcatccacaggtaggagttgaacgccacgagattgccgagggtcatgcgcccggtgatgaccaggaatccgccgaatccaagcgtgatcagctgcagtgagaagccgagaccgtcgagccatggcatgtatttgcggctgttgtaggcctggtccatgttgcgttgcatgtaatcgtcgttgtgtttgtcgaatttttcggtttcatacggttcgcgcacgaacgctttgaccacgcggttgccttcgatgttttcttcgaccattgagttcatttcggcaagcgagttgcggatggcgaagaacagtggtcttgcgtgcgtggagagtccgcgcgtaaggatgaaaatgaacggcgtgacgcatgcgagcgcgagcgcgagccgccagtcgatggtgaacatcatggcgagcgcgccaatgaacatgaccacgcagtcaagcacctggtagctcacccagctcagcgcgtggcgtatggcatcggtgtcggaggtcatgcggctcatgatgtcgccggtacgcgtgtggttgaaataggtgaagtcgagttcgtgcagtttctcgtattcgtcgctgacgagacggaatacggagttctgcccgaagcgttccatccacatttggtagccgtagcgcgaggcgacgcgcacgatggtgaacacgatcatcatgatgcacagtcgcgtcagttcgtcgacttggccttgcacgatgacacggtccacgatgaggcctgacaatagcggaatgatgagcgccatggtgttgttgacgcagaacagcactatcgcgccggccactcgtggcaggtcgggtttgcagtatggcaggatccatttaaggttgcctgcttctgtattacgattcggatcgacgtacatacgtagcgttccttcggattgtttgctggttgtctgggttttcgtgggttggttttgcgtttttgcgttgcttttacggccattcgttgccgttacgattcacgtccgtcgtttgtcgagcgtcccgttgccgtctctctcggtcgaaacccctgttcggattcgcaaacgcgacttattctatgcgaaccgttttttgatgcaacgtgagtgatttcggcgtgtcgcaatcgcaataaaatcaacgcatgtaccgttacataaattcgctctggacgtaaaggaatatgggtgatcgcagtagcgctttctatatcgaaccggtacgatatatcgaggtgcggcattccgatgacggaacggccgcaatcgcatgaacatcatgaaaggacggcgtcgatgacgagcacacagaccattgaggaactcagcgcacaatacgcggcaaaatatggcatcacccgtgagatgatcgaccatgcggaacgttggacggaaaccgacggcgatctcgaaggcctttccgaagagcgcgtccgcggcattctcgacatgcgtttcggcgcgatcgcggttgacaccccgcgttccgaactgtggcacacgcctgacacaatcgacgtgatcgaagatattccatacctgcctgacggtggctacgatacggaagccggacagtgcagagggcatttgctcgacctgtatctaccgcacgatgcggtgctgcgctgcgggcatacgctgccggtgtacatcgatatacacggcggcggtttcacttacggatataaggaattgaaccgcaacttcaacgtgcatctggccgaaacgggcttcgccgtattctcactgaactaccgaccggccccgcaaaccgatttgaggggtcagctggcggacgttcaggcggcattgcgttggatcaaggcgcatttgactgattatccggttaatccgaacgccgtgttcctcaccggcgattcggcaggcggcgcgttgaccatgctgacgttggcgattgaaaacaatgccgaagccgcggccgcattcggcgtggatgagccttcgggcattggtttcgccggtgccgctccggtgtgcggtgcctacagttccgcatcgttggaaaccatgggaagcgaactgaccgtaggctacgatccgaatcgccgcaccggactcgaacagatgctgggcgtcgaattcttcgacggcatcgaagccgccgacccgaagttcctcaccgccgaaggcctggcgttcaacgtcaacctgccgccactgttcatcgtgacctgcggcgacgatttcctcgaggccgacaatctggcgcttgctgccgcactggcccgcaagggagccgatttcgaactgttcgacccgaagccacgccgccacgaaacgctcggccacgtgttcgtgatcggcatgccatggcttgacgaaagcgtggaatgcttcgaacgcctgcgcaggttctcgtacgagcgctgctgaatcacgaatgcctgcacgcgaccacgcataatcaccagcatcacaaacggccgaccatgcattactcacgcatggtcggccgtttgtcttgcaactcttttcggcaaaatcgcgaaacataaatcgcgaatcgcacgaatcgcatgcatcgtgttcagaaaagaagaaagccggcggagagaagggccgccggctgagagagaagagagaagaagggttcagttatggggttcttcaggaacctcgccagccgccgtaactgctgacatgttctatataagcgcccgagtcttggaggaatgatacgtgttcctgccaattagctgagaaaaatgtatcagacatgtgagcggccatacacattcgtgaattccgtcgaatgatcgcaacattacttccgatttgcccaatcgcacgtctatatcactcacccactccgcaaaaatcatccatttcactggacgattctgaaaaaacgcaaaatcatccatttcaccggacgatatgtcgagctcaagatgctgccgttgtctttctcggaataccgaaatgcattgcaaccgacagcaaatgacaatgcgctgttcgaccggtatctcacatatggaggtctcctctacgtcacacagctcaccttggataccatcgggctcggcgactaccaagacattcgacaccgcaacatcctcgactggctgctcgagtaggacacactctcccgactgcacaatttgcgtccacggatcacaaggtacgaaaaatagcgggaccaaatagttcctgcataacgtgcgccgtgttccacctatgatggatatatgaaacatttcgaatatgaaatctccggcatcgacggcagcgcagcgaaattcgtcggatattgccttgataacagcgaagaagtcgttcccgaccgtgtgcgtccgtctgtgcttgtgattccgggcggcggttacgaaatgacgtcggatcgtgaggcggagccgattgcgatgcagtttcttgcggccggtttcaacgcttttgtgctgcgatattcggtgaagccttccgtttttccagttgcgctgttggaagctgccgatgcgatgacgatgattcgtgagcatgccgccgagtggcatgtcgatccggatgcgattgccgtgattggcttttccgcaggtggtcatcttgctgcgaatctcgccacctccaccagcgacgatgttcttgtcgctcatggttacgatccggatgcggtgcgtccgaatggtttgatgctcgcctatccggtgatcacgtctggcccgctcgcccatcgcggcagtttcgattcactgcttggtgaacgccgcaacgattcacaagcgcttgaatccgtgtcgatcgaacgtcatatcgacgccaaaacaccgccggttttcgcatggcataccgttcccgacgaaaccgtgccatacgaaaacacactgatgctgatcgacgcttgcaagaaagccggagtcagcatcgaagcgcacctattcccgcaaggcgggcatggactgtcgttgggcactgcggaaaccgcatggcagggcgtcaacggcattgaaccgagtatccagatctggccgcagctggctgtctcttggatgcgcagaacgttcgcacgataatcagcgcagcagacgccgtgacatctaaccccatctagtcacgtttcccgcctgcgcaacccgcaccctgcatctgcacaacccataaaatcgggttaaaaacccgggttgtgcagacgcagaacgcaagtcgcgcagacagcacaacacccccgaaccgaccggatagaccgaaaatcgtaagctcgggggcaaaaatcagcggggctgacggaagcgacgatcgccaatcggatcgaacggtgtatgcggctcgagctgataccagtacgcgacggaagcgacgtcgtcctgacgctcgaaattgccgccctcctcagtaccgatctgctgccattccacacgcaaatcatgttcgaaataaatcggatcgggaatgtgccagcgatacaatccgcgggtcaccggcgtattcacatcccaatacgcgctctcgcgatgcgaggcgagacgctgcgaatagaacgggaaaccgacgtacggcgcacagaacgtctgctcatgcatacgcccatgctcgtcgaaatcggcgaaactccacgcgccaccgaaataatcctcggcaccggtgctgcaccacgtgggatactggtcgtccccatcgatgtacatcttgacttcaccctcgccccaccagcggctttccaacgcggtgagcgccagatacgtgccgatatacgcgccacgaccatgcacgccgtcgagcaccacatagtcgcgggccagttcggtgacgcgctcgcgacgccactgcgcatgaaaacgcatggtgccggccggaagcgcgtcatattcggtgtagtcgatctggtagaagaacgcgggaacgtcttcattgtgatcgttgcggagcacgatgcgcgcatgttcgaacggcatggagaagtagcagttgaaaccgcgattgggcacgaccaccaccggcatcgaattgactcggcaggcctgcgcgtggccgcagcagaagaagtcgccgaccgggcattgcacggacggggtctcctcgccatcccaatagaattccaggatcaggttgcgaagcacgttcggaccggtagacgacgtgcggtcggtgaccgtcatccaaatatggcggatcacgcccggaccgtccacatccatcaaagtgacgctctcccccgctttcacggtctggatgcacggactgcccttgcgcgacgggccaagtgcactggctgcagtggccgcagcgcccttgccgcccgtgggattctcggcgttcacgcaacgtgtgcgccctggtgccgcaaccgcaagcaagcccagcggactgcgcgcggcgaacgcacccaacgaatcaacctgcatatcgtgacgtgagctgttttgcatggtgctccaatcgttatctcgagtcataagaaaccccttttcccgctactttacggcaccagcggtaatgccctgcgacaacttgcgctggaaaataatgaagaaaataatagtcggcacaatgctcagcagcgaagccgaagcaagtgtggtcgcatccatcgtgcgttggccctgcaatgtggcgagcgccagcggaatggtctgcacgtcgtcgcccatcaggaatgccatcggaatcatgtattcgttccacgtccacacgaagaagaacacgaacagcacgctgatggtcggccaggaaatcggcagcaccaccttacgcagaatctgccagcgcgaggcgccgtcaatggctgccgcttcgagaatggcctgcgggaacgtaccgtatacggacgacagcagatacgtgccatacgcactttgaatgatggtgaagatgatgatgatcgccagtttggtgttgtacagtccgacctgcttgaacatggtgtacagcgggtagagcagcgcttcctgcggcatcatattggcaagcatgatggcgagcacaatccaagtgttgcctttgaccctgccgatgccgagcgcgaaggagttcagcacggaaagcacgacggcggccacagccactaccagcgaaataaccaagctgttccagaatttcagcgggaacttggtggtggtccagaaggagatgatgccgtccatggtgaaatgcttcggcagcgaaagcgggcctgttgcattgtaatcggcgggtgttttgaacgcgttgacggtgagcacgagcaacgggaaaagcacgagcagtgcggctgcgatgagcacgatgagggtgatccagtcgccggtcgagcgcacatgttgggttttcttggatgctttccgcgctgccgatgcggtcatggtttgcgtcatggttgtttcctcgactttcgaagtcttgcgagtcttacatgttacgggtcagttgcggtttgaaccgttcagaccagttccttttcgacgtgcttctgcaccatggtgaacacgatggagaacacgatgatgaccacggtgagcgctgtggagatggccgcgccgtagccgacttgttgcacttggaagaattgattgtaggaatagtatgatggcacggtggttgccgttcccggcccgcctttggtgagcagatagaccggtgcgaaggttttcagcgcgccgatggtggcggtgaggatgaccaccagcagctcgggaatgatggacggcagcgtgaccacacggaatttctgccaccagttggctccgtcaagaccggccgcctcgtaaagttcaggatccacgcgctgcagaccggacatgaagatcacgatcggatagcccaactggatccacaccagaatgaacatcagcaccggaagcgcgctatcagggctgccgagccagttatgctgcaacgatcccaggccgagcttgacgagcagcgcgttcaccgcgccatcttccggacggaagatccagcccatgatgatggccgcgacagcaaccggcagcaactgcggcaggtagaacatggctcgcaggaaggaagccgtcttgccgccgaatttcttctgaataacgtcagtcagcagtgacgaaataaatagtccaagaatcgtaggaataactacgatagccacaataatccagaatgaattagcgaatgaaatccagaacgtggaatcagcgaacagacgtttccaattctgcaatccaacgaatttaaccgggccgactccacgccatcgagtgaaactcaagtaaatgttccacacgaatggaataacgacgataacgagcagacctaccagtccgggaacaagatatggtacgaattttgcggaacggtttccgggaagccttgacattgagactcctccgtttttggtcttctttgacattttggcttttcctttggttgcgctgcgttgcctgtgaatatttacgattgcgatattggttcgcaagttgtaatttgcgataccgcacgggattattcatgattgatactgagcaaaaccggaataatcccgtgcgatgtcggatatgagattggatatgagatcagatatacgatcagttggtcttgacgcccatgtcttccacaccgacgtcgtacttctcgtggatacccttgagcacgtcggctggcttcttggtgccgttcaccagttcctggaattccgccggaacagcatcggtaaggttggaagcggcgtaatccgggtagtagctgagcttgccatcattggcgtaggaggcgtattcctcgatcatggccttgctcttctcgtcgttgatcttgctggcgtcgcccgccaccggaattccgccggcgttgccgaggtagttctgcacatcgtcggaaagcacgtagtcaatgaacttcgcagcgagatccttgtggtgcgagcgttccggaatcaccagcagattgcctgcgcagccaatcgcgaaattcgattccggcatcaccgcggcgtcccaatcgaaagtggtgatctgcttgacgaaacgtccctgattccaggtgccggtctgatagatcggatactcccccttgatgaatgcctgcgtggtgtcttcggccttcataccggtgacgttgcgggagatgaagcccttgtcgagccagtcgttgatggtgttcacggaattggtgagaatcttggagttccagtcgacatcgcccttgtagagctgccagttgtcgatgaatttggcgtcggcctccttggaaaccagctgccaccacagccacatcacgccgtattcctgcgcgtcggcggcgatcggcgtcactccggcatccacgaatttctggcagacgtccacgaactcgtcataggtggtcggaatctccagcccgtacttggcgaacagatccttgttgtagtagacgcgctggaattccgcgtaactggtcatgccgtaccaggtgtcaccatccatgatgccgttttcatcatacttggctacggccgcattggcgccggtcaccttcttgtcccaaccgtattgatcgacgtaatcacccaaatcggtgagcagccccatggtggagagcacgccggcagaaccgttgccgcgattggattccataagatccggcgcctcatcggaattgaggaattggctgccgttctgcgcgatctgcgtgaacgacttgcgttcgaaattgattttgacacccgtttccttttcgaaggcttccgcggcgcgacgccatgcctgggtctggccagcgtcgtcttcctcgtaataccagaacgacaggctgtctggcgtttcctcgtcttgcgcggtgtcgctgccgcatgcagcgagcgtggtcagcgacattgccgccgcggccgcaagtgcgatgcctcgtgtgatcttcatggtttctcctttgttattggtggttgtgttgttgagttatgtctcaagttgtttttcagttatgaagattgatatgtgtcgcctccttttttcgaaacgtttcgacgatggccgcggattggcgcttttcaattcggcaatcaccatcttcgcttcggctacaacgccttcacttactttcgaatcgtttcgattatggatacggaaatccgtccgcctttcacggacatactcctacagttttcttttcacacgtcaccaactttggtaacggaacctcgactatgcatgaccggagcggacagctccaccaatcccttgatgtcgcgatgctcatcgatggcgtcgaccagcagatccacagccttagaacataattcctgcggcatgaccggcatctcggtaatcggctgcggcatcagctctccctcgaaatacgtgccgcacgacaataccgaaatatcatctggcacccgcaatcccgaagcctgtaattgctgcaataccaacttcagcacattggcgttcgcctggttgacaatcgctgtggggcgctcatccaaagaacgaagctcacgcacgaattccgcggcatcaaagcgatcgtcacgatgcttggaggattcatgaatcgtcatgcccaactcttcggcacgttccagcaaagccttgcggaacagcagcacatagcccgaaccgcgatcgtaatcggtctcattgtcacgcaaaaacatagcgctccgatgccccttggaatacaggcaatccacagccatacgaccagccgtggcaaaatcgatatcgacacaggcacagccttcatgctctgcagggtaaccgatggccacacagggtttggaatatgagccagcctgggcggtacgctcgtcatgttcctcaatgtcgagcagcaccacgccatcaaccaagttgctttgcgtcacgcgccgaatgtcagccaccgcgtcctcgccggtaagcaacagcacatcgtagccacggttctttgcctgccatgcggtctgcagaaagtaagcgttgtatttggcctgattgatatcaccgcgaatcggcgcgctgagcgcaaaaatatgattgcgcatgccgcgcattttacgggcgctggcatccggagtatatccaagtcgttcaacggcggccatcaccttatcggtggttttggcggaaatggaacgcttgccggaaagtacgtacgaaacggtgctgactgacacccccgcctcccgagccacatctttgatgcccgccatcttccgcctccttcggctctccaagtcatttgcgttacacgtcatgcgtaccgcagctctcgtccatcgttcaacaaagccatccgccgagccttccggaatttcttccgcagaatcacgctcgtattttatcgaatcgtttcgtcgaaacgtttcaccaatcgtaagccagcaattcagatttgtcaaacgtttcgacacacctacccgtcattcctcgaaatgatggacaccaggatgctgcgaccccgttccttcatatcatgattttgatgtaccgaccgttgcaatcttgagtcccgtcgcacgattgcgatttggtttcgaccttacgattttattttccgctttttcccaaatcgtgaggtcagcaagccaaaaacgtgcggccatcctccccaaacactaggacgtgcagacggaaacgcaagttgcataggatggaggcatctacaaccgccgcccgtacacgtacacacgggctagagaagtctcaaggctacagcgggcgggactcgtagatcatctgacgatcgccgaagtagagggcgtcacgccaagaggccttcttgcgggccgcctcctgctgaggctccttgatcggcacgaagaaccaacggaccagaccaaccaccatgtcttgcacggaatgccagatgccgatatacgcggtcaacgcccagaacgtcacgatcgcattgaagccggcgaacaccgcgttgccccaattatgcgaaagcgtatcggcgtagagcaccatgcacgagtaaatgatgatcacccacggcatcgtcacatacaatgccggagaagcggtacgattattgactttcggcgtacgcgcgaacggaatcttcgtgttcgtcatgccctgctgaatcgacttgagcgtgccggaaagattcaccgtcaacagcacgatattgaagccgtagatacggaaaatatcggaacgcttatacccgttacgcttcaaatcgctcgacatggtggcaaaatacggcagcgacgcgagcaccacccacgggctcagcaaccgctggtcgaacggatatgccaagaggaacatcaggccgaaactcgaccatgcgatggacgccatgtagttcacgcgcagcgcccactcacccagcttcacatcattgccctgctgatgccgcgcgtgcacaatacggaagaatttgccgatgatcagcagaccgccattcgcccaacgccgccgctgcaccaccaacgaaccgaaatcaggcggggtggcactatagcttaaccgctccggatagttgaccaaatgccagccgaaataacccaaatcgatactggattcggtgtcttcgatcaccgtgcgatcctgaatatacgttttcaccgtgcgcgtgccctcagtcgacaccacgcagatatcgtcgagcgcggccttgcggatcaccgcgttcgcacccacccagaacgtggcgtcatagtaggtcatgccctgatgcagcatgtgctgaatgtcggtggtggcggccgcgatgcgttcgattcgcgtcggcgcgccacgatacgaggaatacggggtttgaatcacggccacgcgctcattgccgggctgttccatctggtacaccaagcgcaggcagtagtcgcgcaacagcatggaatcggcgtccaacgtaagcacgtattcggaattgcgcatcacgaaatcgggagattcgccctcacgcacgtcacgcagaatcaccccgtccgacgtttccacgcgcttgagcgagtgtcccatcaatccgatgaacgaattcagattcatggctttgttgccttcacgggaggtcgacgcatacagcttgcgttcgaacgaccatccttttgcagtgaaaatgcgtaccaaacgttcgtacagttgcagaatgcgattcgcgtcgacatgctgctgcagggtgatcgattcgttcaacgcctgttccgtcaaacgcaggtcgcgtgcaagaccgcgcaatacctggtcgcagaagaaatcgtcggtatgatcttcgaccagccatgtgtcggccttatgctccaaccattgcgcggccgcacgatagtcttccgcacagtgtgcgaccacactacgccttgcgtccatctgatcggcgagcgccgcaacggtttcgtcgcgcgcttttgtgaaacgttccgcaggtgccgccaattcggccaatactttcggcatgagttcgcggcttgctttgagaatcgctcgcgcttcatcatttttaggatgcggaggatcgtcgattaggagtacgactgcaaggtcgggaaattcctgcaatgccgccgaccagatcgttttttcgacgactttcggctgttccacgtacgaaggaatcagcactgtgattcccttattgtagttgtgtgcgaaatggtcgtcgagcatcgcccgaggcacgcgttcatgccggatgaaacggtatagcgccccttgccgtgtggtcaagtagacgagcgcgctgaaaatcagcgtggtcacaatcgtcatgtacagcacgccttcaaccacgaaacgtaacgtgagtgaaggattgttgacgaacaacgacagaatcatcgtgatcatgtagatcagccatgaaacaaccgtgcagatgatggcaacgtaaccaagcacaacgcgcgttggcgaaggcttggcatgcatgatcgcaagcggttgcgtggaggtttcagcaccccactgatgtttgcgatcaccaccttcagcatcccctattattgccacctcaaacccctttgaattgccggcgccgcctcatcgacgcaaaaacatacatcactgcctaaaatcttcgtaccagccacatactacactcccttactgttagcaagatataagagagccagcgcacgagaggaatacccaatcccccgtaaaatcacccgcctgcgcactgaagccaagcggggcatagcccgctcgaacacccgatgcccccatcggcatggtagcttgacgattcttgatgaaagggaatgatgaaacccctgtttccaggaagacgattttccttcctccgattgttcatagcgatactgtgcatcgcgctcgtcgcggccggcacatggtcgtggatcacgttcacgcgaacggcggctaagaaattgccggaaccctggttcggtggctatgtggacgtgaccgcgacaccctcatacgagtttgaatccaaagtgggcaacgtctaccggaatgtgtccctcggtttcatcaccgccggcgacggctgccagcccagctggggcggctactacacgctcgacgaagcggcttccgcgctcgatctcgacagccgtatcgcgcaaacctacaaaaccgatcgcacggtaaccgtcagcttcggcgggcagaacggcaccgaacttgccagcgcatgttccgacgtcgattcccttgccgacgcataccagcaggtgatcgaccgctatcacatcacctcgctcgacttcgacatcgaaaactcgaatctcgacgggtacagcgaaaccgcaacccggcgagcgcaagccgtggcaaaactcatcgccaacgaaaaagccaaaaacaaaggaaaagacgataccagtcacgatctaatcatcagcctgacgcttccagctgacgcgaaaggccttacaatgcaaggaatgcaaaccgtgaatgcgtttctggacgctggcgtgacgctctccaccgtgaatctcatgaccatggatttcaacgtggcatccacgtcgatcacacaatccaccctgatcaaaagctcattgaacgcggcccacgcgcaatacaaaaccttgctgtacagtcgcggcaaactcttcagcgaccatcagatctgggaactgctgggagccaccgtgctcatcggccagaacgacaccaaaaacgagtatttcacgctcgacaatgcgcgcgaaatcaacacgttcgcgctagaaacaagcctgggccacttaagcatgtggtcgctgaatcgcgaccagcaatgcggcgaaaactatacgaacacaaacacgctcaaaacattctgcagcggcatgaaacagacggacggcgaattcgccaccaccttgggctcgggcttccgaggcacaccgggcacgctcgtcgatttcgacaatgcacgttggaattcctcgcagcaggcctaccccacgtgggaaccgggagtactgtacaagcaaggcgacaaggtgatctggaacggcaatatctacgaatcgttgggcaacaacgaaaacgagcagccggacagcgccgaggaaggcacgaacgcaccgtggcgcatcatcggaccggtgttataaacgcttgccgcagcgagacgcaaccacagacacaatacaaagcaggaacacaaggcagtcgctacttttcagtaaaagtggcacgcaacaggggaacgaaatcaggcaatcatgacatcgaagcaatcaaagcatcaggcagccaccggcagccagccaaaagacggcatcagaaaaccagccagactcaccattctggccatcatctatgcgttgtgcattgcggccgcaatcgcattccatgcacaggaaggcgtgcagcaacttatggaagaccctgcgcgcatctgcatatggtcgctgtgctttctgctgtgcctgatctaccacaaaaagcgttcgtcgtatcgcgttgccgccgaacacaccgtgctgccaccgttgaccgtcatactgctggtaaccggctattttcccgacgtggccatgttcctgatcatcgttaccatcatcacgtcgatcatcaccgcacgcagtctgaaaatcggcattcttcgcgccggaaccacgcttgcgccaatcccactgatcaaaatattatttgcgaacacttctcacgtactgtcaattatcatcagccagaattccgtcaatgctgcgattaatccttatcaattccagcattggttgctgccattactgattatgactgttgcagtgccgattattcgattgatttgtgatattgtaacgttcttttttgtacaaattccgattcgtaaagccatgcgcgagtattcgctgtctcacattcttgccatggctttggctgatttgatggcgattgtgtggattcctgaaattctggagttcgccaatattggctcggatactgccaccgtgctttccgtgttcatgctggcactgatcgcctactcgctgttgctgatgacggtcgatacgatgaaccggctcacgcgatcccgaagtgcgttgaaatgcatagcgaatgtgagcgacgcgctgccgttgccgaatcaagtgccggaagagaccgtggtaagacgcattaatcgtggtctcacccgcatgcgctgtttcatcagcaatgcaaacaatcttgataaaagagggtattcctaccgctattccgcgcctatttccaccggctcgcgacagtattatctcgcgatggaacgcagtatttggaatcgtccgttcatgtcgaccgacgagacgatattgctcacctgcggcgaagtgcttaccgaatcgttacgcgtgaacaaggaagtgacgctgctacgcaccgaatcggaaacggatacgctgaccggcgcactcacgtatcgtgcgttcatcgggcatttgaagagtttgcagaccgagaatgtgcataatctggttgccgtggtgtatttcggcgtggagcatttgcgcaccgtcaacgaacattatggacgcaaaatcggcaatgccgtgctgcgatccgtgggcatgcgtttaagccagctgctgccggaaaacgctacgctttcgcgcgtgaacggcgcggaattcgccatgatcgtaaccgatgtgacgtcaaccagcgatgtggaggagttggccacacgcatgcgcaatcttgccgtcatgccggtgtacaccgaagaaggcgaggtttccgtggacgtatcgagcagcatttcgttctcgaatgcgacagacggcttctccgtgctcctcgccgatgcgagcgcgcacatctacgagtcggagagctccaatctgcccgtagtcgacggcatgacgtccacgctcgccgcgcagaatggttcgggagactatttcaacgcttccgacgtgcttcgccatgcgatcgaagacaatacgatttccgtgctctaccagccgattttcgatgtgaatacgaaacgtatcacttcgctggatacgattgtgcgcgtgcatgacgcgaagggccgtacgctggcaccgtatttcgtaacggctgaagcgcatcgtctcaacatgagcgtgcagctgacgctcgacgtgctggaaacctgcgtgaaagacatgaccgcattccgcaaggtggcacccgaattggatattgtggacatttgcatgaatggttcggaattaggtgcgtccatcttccacgagcgcttggagcagttgactcatgagcagccacagctgcgtttcggcctgcagttgggatcgcatgccattcatgtggtgcatgatgaagttgatgatgaggttgccgctcttgccgctttgccgaacgtcgagttgggtttgaccaatgctggcaccacgtattcggaggttgccgcgttcgcgcatctgccattggatttcgcacgattcgacaagacggtggttcgcgatttccgtacgcctcgcgcaaagcagatcatgcagcgcacactcgagatttcgcgcgataacgatgcgttccatgtggtgttcgatggcgtggagtccctggaccaggttgagttcatccgttccatcggaggcacgctcgccgagggcacgctgttgagcaacgccatgagcgccaacgagttcctcatgcgcctcgaaaccatgggcacttcattgcccgaagccgccccgaggcaagctgagtaaagaggagtctcgtttgtcgcacgattgcttcatctcgtgaaacgcttggaggaaatatggcgagatgggagcatgtgtgctaaattaattagtaaacgtgtttagccaacgatggctttgaggaggattcacatggccactatcagagagatagcgaaacgggtcggtttctcccaagccactgtttccagggttttgaaggacgatcccactttttcggtgaaggattccacccgcgagaagattctaaacgccagtctggaaatgggatacaagaacgtaccgcaataccagcgcatcaccattccgcaggatgttgcgattctcgacaatgtcgtacccgacaagggcttgcaggacgcgtatttcgacgagctgcgcgaagtgctcgtcaagcatgccgaagagcagcgtatgaacgtgaccatgcacgaggacgtggattcgctgatcgccgatgccgataaatacgcgggatttatttcgatcggcccgtccccactggatcacaagacgcttcaccgcttgcataagaagcttccccacggcgtattcatcgacatcaatcctgcgccggcattgttcgattcggtacagccggatttggaacaaaccatattggatgcgatcgacgcgcttatggggtcgggttgctctcggatcggcttcattggcggcttgggcaacattatgggcaagcatgaatatccggaagatattcgtacgttcgcattccgcaattgggcgttgcgcttgggattggatgcgcaaggattggtgtatgcggacggcccgttcactgtggaaaacggccgtttgcaggggcgtcagttggtgcaggatcatgcggacgatctgcccgacgcggtaatcgtcgcagccgatccgttggcggttggcgtgctgcaggcatttgccaccgaaaatgtgatggtgccgcgagatatcaaagtgatcagcatcaacaatcaggagatcgcaaaatacacgtctcccgcattgtcgtcgtacgacattagccaggacgagcttgcgaaagccgcggtgcttatgcttgccgaagcgctgaccgccgaccgcaaaatcagccagcatatgcgaatctccaccagtctcgtcgcacgcgacagcttcaccccgcaagactaaatataaaaacttgagatacggcaagggccggcatcctattgcggagccggccctgcaattgtgcttcagtaatctcgcttcagtaatctcgccttagcggagagggcgagcgtcacaccagacgtgggtgacggaccaggtggcgggatcgagcagaagcacgtcggcagcgtagccgggagcaagcagaccgagaggttgcttggtgaccgggttcgcgcggtcgaaaccgaatgctttggccggagtcaacgtggcggcctccaccgcgtcggcgggcgtgaatcccaattcgagcaccgcacgctgaacagccttttccaacgtcagcgtggaaccggcaatcgcaccattcgacacgagccgagcgtgaccatcgatcacatccacatccaacgcacccagcagataatgaccgtccgggcagtcggtagcagccatggcatcagtcacgaatgccgtgcgatgcggtgcgaaaccaaatcccaaacgcaccatcggatcctgcacatgaaaaccatcattgatcaactcgatagtgacgcgtggatcctcaacagcagccggaattggaccaggctcgcgatgatgcaagccattcatcgcattgaacatgtgcgtcataatgcccgcgcccgcgtcgaaacccttgcgagcggtcgcataatcggcatcgcaatgtcctaccgcaggaaccactccggccgccgcgaagcgacgaatcgcatcaatgccgtgcggcaattcgggggcgatggtgatctgacgcagacagccgcctgccgcttgcaaaagccgatcaacatattcgggaaccggatccttcaaacattccggatcatgcgcacccttgcgagacagcgcaaggaacggtccttccagatgcgcgccgagaatgtcagggcgggcgctcatcatgccgtgcacggtttcgagattggcgcacatcacgtcaagcggattggtgatcaaactgagtacttggcgggtggtgccgtgcatcatgtgacccgcgcgagccaaacgtatgccctgcacgccatcatcgaaggaactgccccacgaaccgtgcgcatgaatgtcaacataaccgggagtcatcatgcgacctgcagcgtcggttacggaaccggccgaaccggtcatggcattgccggaaccagccgaactgaccgaaccggaatcagcatcggcaccaactgcagcatccgcatccaaaccgacgcttgcgcaagccgcagcaaaatcagcgtcccgattcccagtcgcaataatcgcgctaccatcggaaaccagccaataatgttccgcaacacctcgcgcatcgactttgcgcgcattgtgaatcgcaaacgggcgggccgactgcgccaacgcaatgtccacctcattcgcaaaccgctcacgagactgttccatcttcataccttccaattcactcccagccatattcctcaattagcatccaattcttccagtcagtggaagaattaccccgccgacaagcccatcagcgtccaaaaacctccagtcggtggagaaatcctcccgctaacagccacctcagagtcccaattcctccagtcactggaagaatccggacggcgaaacaccctcgtactgtccaaaaacttccagtgagtggaagaatcatcccgatgacaggccgaaaagcgtccagaatgttccagcgaatggaagaatccggacgctagcggacaccgactgcagagcagcaatcagatgtgctgccaggcgggcttgtgggcgtaggcgtaacggtagtagtccttgtgacgcaggcggctcgcggcctcctcgtccacaatgatggtggcgtgcggatgcatttgcagcgcggacgccgggcagaacgcactcacaccgccctccaccgtttcggccacagcctcggccttgcccgaaccgaaggcaagcagcaccaagtggcgggctttgagaatcgtgccgataccctgcgtgatgcaatgcgtaggcaccttgtcgatgtcgtcgtcaaagaatcgggcgttatcgatgcgcgtctgctcaaccaacgttttgacgcgcgtgccggaagcaagcgacgatcccggctcattgaagcccacatgcccatcagtgccaatgcccagaatctgcacatctatgccaccggcctcttcgattgccttatcgtaggcagggccggcagccgcaatgcgttcgccgtcgctcagcggcgccccgtcgagcacgtcaccaggcacgtgcaccaaatcagggttcagtccaagcggttccacaacagtgcggtgaatggtggaatggtacgactgcgggtgatcaagcggcaatcccaagtattcgtccaatgcgaaaccgcgcacctgcgatacgtcaatatgctcgctgtgcacaatgcgtgcgagcgaccggtatgcggcgagcggactggatccggttgccagacccaataccgcattcggcttggttttgatgagatcggcgactgaacggccgtaaatatcgcccgcttcgcgctcgtttttcacgatgatgacttcggtcatgatgttcctttcattggcattggattgacgtttttcgttttgctgatttcttgaggatttgtttgatgatttatctgctgattcgtcgaagctcgtcggctgctttccacacggtttcctgaatgcgatgcagttccgacggttggcttgtcacgttccattccttcgcataggcctcgcaccagcattcgagctcgcgtgccagcgcacgataatcggaaggccgccaatcgccagcgtcatgcgcatcacgcacgtcatgcgcttcggcgagcgcgaatcccactcgattgagcagcagctgcccttccatggcgatgcgtacggcagcagtaatgcccggatttcccatatgtgccgcaatcggcgcgatgtcgaccatgcattgttgcaatgcacgattggcttgcggaattcgttcgattgtcgttgccatattgcgcatcattcgattgcgcgcttcacgcacagtcattgcgtttccacagtcagataaatgatcaaccaagcgatcggccaggcagggaatggtttgcgcaacatcggtattgcagtttcccgtgccgtcatccaattcgagatattccacaagctcacgccaagtgaatacggcttgcgcggaagcgttacgaagcaatgtgacgaaacgagcgctgcaatcgccatattcgacgcgcgaaatacgctcaagcaagtcgttttcagcactatctccagcattttcagcggtatttccgtcagtctttccagcactatcttctgcgggattccacgcatagtgcgcaccgaatatcatgccgggaaccgccatgcgcggatcgttgatatgcccaaaatcgccccaatcggtgacgagcatgccttccgcaccgcagtcgatgccgtagcgcgcgatgcgtgaaatgttgttccacgcatcgtcgatgcgcggcagcagcgcattccacccccatacggccgggcatacgatttgtttggctccggcttgcgccacgagttggattttttcgtcggtcgcttccggttcgtactgccagttcagcagtgtgacattgttcggcagggtttcgaggatttccggcatttcgacggcgatatctccccagaacatgggttcgcggccctgcttagacaggtgttcgcagagtttgcccacgtatgttgcgtacagcgctgcgacgcccacgcgttgcgcttcctgcttcgacttgcctttgccgaggtcgaaggtttcgtcggcgcagatgttgaatcgcttcgaacggaaaagttgcagatacgagtcgaccagttgcgcagagaatgcgaaggctcgatcgtcggcgacgttgagtgtgtggtgcctcatgcgttcgatgaagctgaacggccggtctgcatcttcggggaattcgccgagttcgcgcagttcctgcgtgcgcatggccacatattggtgtccgaatgtggagactgacggcacgagttcgatgccaaggttcgcgcagtattggtcgaattcgagtgtgtctgccggcgtgagcgggcttgatccgcgccatgtttcgctcataccgtcgaatgcgaacgtatgctcgatgtacagctgcagttgattgtatttgtagaggcagagtttgtctgcccactgtttgagccatgcgagcgttggcactcggccgcgcgtcgcgtccaaataatatcccctgatttggcatgcgggggcatctgcaatctgcagttccggcagtacgtcaccgttttgccgtatgagttggcgcagggtctgcacgccgttgcgcacgccctcgaaatcgcaaccggtaatcgtaatgccgtcagtgttgatagtcagcgtgtatgcgccggcggtaccgccatcctgcgaatcgaaatcccacgaatccgcaatacgcaatctgatgaaacccgaccacatatcgcccgtcgcaatatcccaatcagtgcctgtcgcggaacgtatgtcggcaacaagctgatgcgcaagcaggaaatcgccatcgccaatcgcaatggattcgttcacgcgccccgcatagggcaacagcaccgtgccttcgccgaccgtcatgctgttcggttcgggaatgatcgcccatttgctggtgttctcgcttgccatcgattcgcctttcgattgtcgattatcgatttcaattctcgattgtgattctcggattgccgggattgccggatctggatttccggaattgttgcgcttgttccagtctgcctgaagtatcacgcattcacgattgcggttgcgctcgttttgccgcgagcgccgcgccgattgcgccgattggttggtcaatggctgcgattctgatgttcgatgcgatgtcgagtgtggtcaggaatcggcatccttcggctctgcggctcagttcggcttggatgacttcgatgagtgcgtcaccggttttcgccatgcctccgccaatgatgatgcgttgcggatcgtaggcttgcgcgacgatttggatggtgtcgcccatggcgtgggccaccatggtgagcacgtcgttggcatgcccgtctccttgccgcgctttgcggatgagatcaggcatgggcgggtttgcggagggccaaagttttgccacggccccgccggatgccacggtttccaagcatccacgctgcccgcatgggcattcgaatccgttggggtcgatgggtaggtgcccgatttcgccgatggatccgctgtacccgtgttcggcttgcccgccgcgcacgagtcctgcggccagtcccgtgccgaagttgaggaatacgacggttgcgttgccgtcgacttgttccacgaattccgcggctccgaccgcagccgcgttcacatcgttttccacgtgcaccggagcgtgcatgattgcgctgacgcgttcgccaagttccaacgtttcaatatcaagattgacgacgttgctcacttgcccggtcgcgcagttcacctgccctggaatgccaatgccgatgggcagcgcttcgttggacagtatgcgggcgacgcgcacgatgtcggttacgacattgctttcaccggagtgcgatggcatacggcagacgtcgatgacgcggtctgttgcgtcgagcagcacgccttcgattttcgttccgccgatgtcgatgccgacgcatccttgcgaacggccgttatggtgcagtcttgcgttcattgcatgtacctgcctgaaatagtggggcccggattacggttgttctgttgatccaactccatgcgtggcgtttgcatgccacgcatggagttggatggatgcccgtcaacccttgaccgcgcctgccgcaagaccggcctgccagtagcgctgcaagccgaggaagagcacgatcaccggcagtacgccgagcagtgcgcccatcatcagcgatccacgatcgttgaaggttgcgagcgataccatgccatacaggccgagcgtgaccggcttgagggtgtcggaggaaaccatcatcaacggcagcaggaagttgttccacgttcctacgaagaggaacaggaagatggtcaccatggctggggcgagcagtcggagcacgatggtgaagaagattctcgcttcaccggcgccgtcgatgcgggccgcttccagcagttcgttcggtacggaggtttgcgcgtacacgcgtccgaggaagaagccgaatggcgaaacgcagcacgggatgatgatcgccagcatggtgttggtcaggtgcagtgcgtggaagatggagtactgcggaatggtgagcagtgcgaccggcatcagcatgcatcccatgaccacgccgatggcgatggccttgccacggaagttgaattttgcggtggcatagcctgccatcaccgaaatgatggtgccgatcagtgcggaaaccccggagtagatcagggaattcaacacccaacgccagaattggccacgggtccaccccataagcttcgaatagttggttgcgatggcgtcgggaatctggtcaagtccgacggcgaaccacaatccgttgctgctggtcagctgcgatggtgttttggtggatgcgatgatggcccaatagattgggaagaggaagtagatcagcgctacgacgagcacgatcacggtaatggttttggtgatcggcgatgggcgcatggagcgcggcagatcgtgttcggccgcttcgcgttgcttttccatcatgcgttccgcttttctgcgggcgcgttcgtcttttcttgctgcgactgcattgctcattgttcgttcgccttcctctcgaccagtgcgtagatcatggcgagaacgcctgcgatcagtgccatgacgatggcgaccgccgatgcgggtccgtcaccgcccggagtcagcgtgccttgggaagtgttcatggccatcatcattggcgtataggttttggagatgcccggatcggcggtctgcatgatctgcggttcgttgaatagctggattgtgccgacgatggacagcaacatggacagcagcgccgcggaacgcacgttcggcagtttgatgcgcatggagatctgccatccacttgcgccatcaatgcgtgcggcttcgtacagttcgtgcggaatcgcctgcagtgcggccaagaaaatcagcatgttgtagccggtgaacgtccatgtggtgatgtttgccatggaagcgagcacaacgttcttgctgaagaaatcaacgtttattccgatggccgcaagacctttgacgatcggcgaaatctgaccgttatacaggtacacccaaatgatggatgcgaccacacctggaatggcgtacggcaggaagtagccgagacggaaacccgtgatgtgcttgaccacgaacgaatcgatgaccatcgccaaagccaacgcgatgatgatcatcagcggcacctgaatgagggtgtaaatcagcaccctgcccacaccggaccagaaattgccggacgtaagcacgtactcgaaattctggaatcctacgaatttattcaccaattcgccgccgccgtacgcgccgccgccctcggtgacctgacggaagaagctggaatagatggcatagaaaatcgggatgatgaatacaatggcgaacagtatgccgaatggcgccatgaacgcccatcctgttcgattctcgcggcgttgcgcatcagtgcgctttggtttcgccgcttgcgttgttgcagtcatgatgtacctatctttcgcatcggatgccattcatcgttgatggcatctttcacagttcgaatcgccgtatccaaatcgtcatcacgggagaggagtgccggtttcagccgctccgtcgaatcagctagatcgattcatagggaatattcacaaggaatattttcataaggaacggtgtggagccgtgtgttgcgttggctccacaccgtcgttggaggggttatggaatcagagcgggtgatccctggttccatacgtcgatcacttcgctacggacaggccgtagttcttgagggtgtcgatggaggtctgctgtgccacagggaacacgtccgccaccttgccggaaccgtcggctgccttgtcggcggcttcctgcatagctgcggagaccgcggagtagcccggcatgtagttgaatgcgaccatgttgtcgttggcagtagcgaattccttcatcacgtcttggccgccgtagaattcgttccaggattcaggggtcttcgcggtttcggtgctggcggccacaatcagaccttgggaggtcagatcctcaacctgagtgttgaaccagtcgaggaattccatggcttcggccttgtgctcacaacccttgagcactgcgacgccggaaccaccgtcagggccggtgctggtgccattgccgaaccagtcaccgatctgggtgacacgccagtcacccttgccggtgtctcctgcggagtccttgaatagcggagcctcccaagcggcgccgatgttgccgatcagcgtgccatcctgcagggatgcgtcgaacgacggcacccaacgcgggttggtcagcgtggccttgttgtcgatcagttcctggaaggtttcagcaaaagcctgcgaaccgctgccgttggtgttgaccacccaagcgtcattcttgacggtgtaccacgggtcggaagcatttgccaaacctgcgaagatgttgccggcctcatcggcttcgtaatccatgatgtacttgccggacgcggccgcggtctttgccgcttcgatcagctcatccttggttttgggaaccttgatgcccagctcatcgaaagccttctggttgtagaagtacacaagcgggccggtatcttgcggcaggccgtaggtcttgccatcaacctgcatcatggaatatgggccttcggcgaagtcgcttttgtacttcgcggcctcttcggtcacgtcttcgagcaagcccttggtgaacacctcaggcacttcggcgtagccgacctgtgcaagatccggagcattgccggccttgacgtcggtttccagcttcttgatcatatcttgtgcggcaccatcgaacttggtggccttgacctgaatgttcggatgatccttgttccacttggcaacaatgtctttgaccaaggtcatgccttcggaatccggaagacggtgcatgtacgtgaggttgacgacctccccggaatccccgccggtgctggccgtattggaaccgcatcctgcaagacccatgcacagagccgcgaaagaagctgcgcaaaccatcaaacgctgagtgtgggatcgcatatctctctccttcgtgagattattccggcacctccttgcaccggatagtcacagcatacctacgtaatccttttttgtcaagtttccttacatttaaatccggcacgcgattgctattccacaaaaaagctgaaattccgccatttagtaacaatcgtaaagcaatcgcaattcgaggaaaaatgccgtatactcttgtttagtaatctttattgccaataaaaattacataacgcacttgtatcgccacaaactacaatatgtatcggctccacacaagaaagcgaggacatcgtgagcggtacccaagcaaaggcatcaccttccgacattcgaatcagcaatatcaccgccgcattcgagcagcttttccccgcaacgcaaatgtcgcgagccaatatcggcaaactcatcggactttcgcgcttcaccaccagcgaagtgaccggcgaaatggtcgacaatcgcattctgcgcgaactcggccccgacaatcgcgaagggcgcggtaaacgttcacaagtgctcgccatcgacaccgatttctggcgaatcgtctccgtcgacctgtcgaatccgatgctcgtcaaaggagcgctggcggatctttccggcagaatcgtggaccgcaccgagcttcccgtcgaccatggctgcagcgtcaatgacgtgatcgacctctgcaggcagctcatcagctcaacgccactgccgacccttggcatcggcatcgcggtgaccggcattgtggaacccaacggcgtggtgcgcaaatccgtgcacttggggtggagcgaactgccgctgaaaaccgaagtggaaaacgccaccggagtgcccgtgatcgtaggcaacgacaccaatgcggcacttgtggcggaacgattcttcggcgactgctcccccaattccatgctcatctccatcgggcggggcgtcggcgcggcattatgcctcaacgacgtcatcatcgaaggaagttccttcactgccggagaaatcgcacacgtggtggtcgacccgaacgggccaatctgcgaatgcggcaaacagggatgtctcgaatcattcgtttccggtgacaggttgcagcaacgcatctcgcaggatcccgccgcgcgtacgcatattctcaccgaagcgggcgcgttgctcgggcgcgtcatggccataccggcaggattgttggatctgcgcgacatttcggtatatggtgcgccggaaatcgtcaatactcaattcatcgacgcgatggaaaacgaaatcagccgcaccgtgaccacggattatcaggaggcgccgcaaattcaccgttgcaggcaaggcgaggatctcaccctgcgcggacaggccaccatcgtgatccgcacactggtaccgacgatccacgaacgcggctccctcatcggcgaagcatagctccggacgccttagcgcgacccaaaacctccagtcggtggaggaagctacccgctaacagacctgctaacgtccaaaaacctccagccaccggaagaatcgccccgtctgcaactctccaagcatccatattcctccagtcgctggaagaatccggaccgcaaaatacccccgtactgtccaaaaacctccagtgagcggaggaatcctcccgctgacaggccttttatcgtccagattgttccagtgagtggagaaacccggacgggatgagaggcatggagacgaaaagaatgaaaggccgcctgcagcggatggagtgcttcaggcggccctggttgtcggaaaggaaggggaatttcagttatcgggattcaggttggcccgccggagtcgcggttccagcagttccagcggtttcagccacggcaaccgcctcgacggcttccacggtctgagcgtcgtcggcttcgatctcaccgttggcgagcttcacttcgagctccttgacgatctcatcgtgcatcttctcagtgatcttcaccttgaacagaaacacgatcaggctcaggatgatgagcacgagcggaatgtagaaggcgcagatcttgaagatgtggatgttggatgcggtcatgtcggctgcggtcgcattgccggtcatgccagcggccacggcgatgatgccgacgatgccgttggacatggcgccaccgatcttgtcgagcatcgggcggacggacagggtgacggcctcgttgcgcttgccgttcttgagctggccgtattcgatggagtcggtcagcgacaggatggcggtcatctgaatgagggtacccggcacgtagaaaagcaccagagccacgaacaccatgatgatgttgtcggagaagatgccgagcatcacatagccggcgatcatggagatcatgccaccgatgtacaggtaacggcgcggaatgcgcttgttcaggatcgggtacagcggagccataaccaagcctgcgaccagtgcgatcacgccggtgagggagtatgcggcctggttgtcgaggatgaacttgaacaggaagatcagcacgccggtggtggccacgttggcgatggcgtacagcaggtagctcaaggcaacccacagcagctggtcgttctggaagatggccttgaaggcttcgatcgggttgccgttcttctgggccttggagcgcagggcgctctcgttctccttggtgccgaaggcaacggtccatgcggtcaagaggccgagcaggccgacgataataccgaagcaggtccagccggactggctttcgacgtacttgccggtgaacacccagctgaagtaggtgacgatcgggatgaccacgacggtgatgccgttgtagccgatggagccggtgaaggagccgagtgcggtgtaggtggagcgctcgtgggagtcggaactcaatgcagggatcataccccagtaggagatgtcacgcagggagtagaacacgtcgagcacgacgaaggtgatgacgaacagtacgatgaaccacgtggtgttcacgttcaccaagccgaacaggccggtgtacactagcacgatcagcacggacgaaatcgcgccggcgaggaactgccatgggcggaaacggccccacttggtggtggtgttgtcgatgatgttgcccagcagcgggtcgatgaagatctccgcgatacggatcaccacgaccaggccggtgatgatgccgatcagcttggtggcgacgcctttatcgacaccagcgaacaaggagctcgtcacatagacgacgaagtaggtgctcagtgcgttatagaacgcggactggccaaggttgccgcacgcgtacgctacgcgctggccgagctttccgcaacgagccgtgccgttcgcagtagtggtcgtattgctcattatctcttctccttagaagattttgatgagatcacccgttgacctcgaaaattgagtatacgttgtttactatcaaaagtaaaattccttagtaaacaaagcccccaaacggcgtgtcgcaatcgcagttcttacgattatcaaatactgacatctgcaatcatgattactaccgccatttgccgtcacctatcgccatataagtaaattcagttgcaaataaagcaacacgcagatttgcaatttaagtaaacaacgtttaccatgctagcaaaagagtttattactctgagtacacaaaagtacacaccaactaaacctacatcaacaacgaagttatgtttcggaaacgaggaaatcatggcagataagatcaccaccgcatccgccgcgtggctcaccgaccccacggtgttcgcagtgaatcgcacgccggcacattccaatcacgtaaccttttctcacattcccgcgatcggcgagccgagcgatttgaagcaaagcctcgacggcgaatggcgcgtggaaatggtgcaggcctccgacatcgatcttgaggaagagccgttcgcagccgaggatttcgacgattccgctttcggccgcatcgacgtgccctcccacctgcagaacgcgggatacatgaaccacaagtacgtgaatattcagtacccgtgggacggccatgagaatccgcaggagccgaacgttcccgaaaccaaccatgtggcactgtatcgccgcacgttcaccgtcgccgagcgtcttgatacggcccgtcaaaatggcggcaccgtcagcatcacgttccacggcatggccaccgcgatctacgtgtgggtcaacggcgtgttcgtcggctacggcgaagacggctacaccccgaacgaattcgacatcaccgaagcgctgcacgacggcgaaaacgtcgtggccgtcgcctgctacgaatacgcaagcgcatcctggctggaagatcaggattactggcgtttgcacggcctgttccgttccgtggaactcgccgcacagccgcatgtgcacattgaagatatgaaggtcgaagcggattggaatccggaaaccgccaccggttcgctcgacgcgctactcgcggtgcgcaatgcgaagaatgccgccaccgtgtcggcgacgctgaaggatttgagtggcaatgtggtgtgggaaaccgcattggccgcatccgacgaaaccggcatcgtttccggctcgttggacgtcaagccgtggagcgccgagagcccggcactgtacgaactgcaagttgtggtgatcggccatgatggcgcgatcgttgaaaccgcaacgcagcgcgtcggcttccgtcgcttccgcatcgaagacggcatcatgaagctcaacggcaagcgcgtggtcttcaagggcgccgaccgccacgaattcgacgcgaagcgcggccgcgccatcaccaggcaagacatgatcgacgacatcacgttctgcaagaggcacaacatcaacgccatccgcacctcgcactaccccaaccaggaatactggtacgacctgtgcgacgaatacggcatctacctgatcgacgaaaccaatcttgaaacgcacggcagctggtgcctgccgggagacgtggtcaccgaggattccgccgttccgggcagcaagcccgaatgggagggcgcgtgcgtggaccgtgtgaacagcatgatgaagcgcgactacaaccatgcttccgtagtcatctggtcgcttggcaacgaatcgtatgcgggagacgtgttccgcgcgatgagcgtccacgtgcacgaactcgacccgaaccgaccagtgcactacgagggcgtgacccacaatcgcaagtatgacgacgtgaccgacatcgaaagccgcatgtacgcgcacgccgacgaaatcgaggaatatctcaagtccgatccgaagaagccgtatatttcctgcgaatacatgcacgccatgggcaattccgtcggcaacatggacgaatacacggctttggaacgctatccgcaatatcagggcggatttatttgggatttcattgatcaggcgattcttgtgcgcttgcccgatggcgatgaacgtctctgctacggcggcgatttcggcgaccgcccgagcgactacgagttctctggtgacggcctgctgttcgccgatcgcacgccgtcgccaaaggcgcaagacgtcaagcagctgtatgccaacgtgcgcattgtgccgggtgaaaccggcgttgagatcgcgaatgacaatctgttcgtttccaccgccgactatgtgttcgttacgcgcgtgcttgcggatggcgagccggtatggcaggccgaacagcgttttgatgtgccggctggcgaaaccaagcacttcgatattgaatggccgttggaggcctaccgaggccaagccaacgagctcacgctcgaagtgagccaacgccttgccgccgcggaagagtgggcgtcgaagggctacgagctgtcgttcggccagaccgtggttgcaggctccaagccggttgctgccagcgagacgaagcctgttgacggcatcgtgaccgttggccgttggaatgctggcgtgcagggatccggtcgtgagattctgctgtcgcgtacgcagggcggcattgtttcgtacacgcttgacggccgtgaattcgtgctgcgcaagcccacgctcaccacgttccgcgcgctgaccgacaacgatcgcggtgcaggccacggttacgaccgcgcgcagtgggtcggcgcaggccgttacgccaagtgcgtcaacaacaccatcgaacaggtcaatgacgatacgctgaaagccgtatacgagtacgagctcgccactccgcagcgcacgcacgtcaccatcacgtatgtggcagacaccaccggcaagctgcacttgagcgtcgactatccgggtgaaactcaggaagccccgaccattccggctttcggtttggaatggacgctgccggtcgaatactccaacctgcgcttctacggccccggacccgacgaaacctacgccgaccgcaagcatgccaagctgggcatttggaacaccaacgcttacgacgatcatgcgccgtacctcatgccgcaggaaaccggcaaccatgaggatgtgcgttgggctgagatcacggatgatgccggtcatggcatgcgtgtgagccgtcacggcgaatcagcgttcgcgctcagcctgcagccgtacagcgcattcatgttggaagaagcccagcatcaggacgaactgcccgctccgaagcacatgttcctgcgcgtactcgccgcgcaaatgggcgtcggcggcgacgattcctggatgagcccggtgcacccgcagtaccacattccagccgataagccgctccacttggatgtggatatcgagctgatctgacacgttggggcatgccggttgccccaacaattacggggggtccgcgtattctgcggaccccctgcttgcgttattgcgttaccgcgttaccgccaatttgcattggcgctcattgcctcatatcatgctcaccgctcaccgctgcggataggaatcctcaaagaagcgacgctcgagatgcacgatggtgcggaacacgtcggcctccgagccatccaccgacgcatactcgttgacgagcgcgatcaggcggcccgtccaggcgcggaaataatcgccctcatgcaaatcaacccaacccttgtgcgccggaatctgctgaacgacgccagcgtcgatggtgcgcttggcccaggcaagataaatccattccatgcagcacagcgcagtaatgagttcttcccaagttccctgaaccagcttggtcagatattcgcaatattcacgatttgccggagtctgctcggaattattgtattcttcgtcagtaattccgtattccttaaggaatccggtaaaatatgttgcttcattgtcagcaaaccattgcgattgtttcgccagcatatctttggtttcctgacgcggcgcaagttcaatcgcatgtgccatgatgccctgattaaagaacttgaaatcctgaattaaataagacttcaaaatcgattctggaagtgtatcatccagcaattcattcacaaaacgcgaattgattgcctgattccattcgtcggccgccgacatatacagctgatcggctacggaacccggctcggctcccaaccacgcataatcgccgcttgcggactgcggcgcttccggaacatgattcatggtcacaagaccccctcggttaatgcggccaatgcaaacgcaacgcacatctcctcgctccgttccgccgtggctcgctgtgatggcgccataatagccgccgttcccaacgtaccgaacgcgccaccgaaacgcaagaagcagaacgcttccatgacagccatgaccgcactcaatctcggcgaatcattgcgcgaatttgttgaggcggcgatcgtaggtcatgaggccgttgagctcttcttcgacgtcggaaacctgcgtatacacgtagcccgccaatccgcgtgattccaacgattccgccgaatcaagcacggaacggacggcagtgcgccaatcctcaatcgaatcgtattcaccgtagccgtacgcgcgcgaaaccgcagcatgatcggcaaccaactgcgccaatcctccgaattccgaaatcacgaacgcacgaacgccatgctgcgcaaccggcaacaccgcgtaatgcgcggcacgacgacgccgcttatgccgcttttcatattcggccacatacccacgcaatggccccttatccgggtagatttccagcggacggaagtagttgtgcacgctgtgaaaatcgccgcaacgctggtcgtaccagccactcgtggcgtcgatcgggcgcgtcgggtcaagcgcatgaatgcgttccgccgcatcgcacgcgtcgaactgcccccacccttcgttgaacagcacccacgtgacgatcgacgggtggccggcaagcatgtgcaccatggcatcgcaggtgcgcgaccagtcgcggcggtacgtcgaatcgtcggcaccgagcgccgcgaaatgcttcgccgtgtcgtcgcggtacttgttccatgtggcacgcatgagcgtcggcttgcggttggtgacccacgcgttgtattcgccgccacccgacaccgcgtcctgccataccagcatgccgaggcggtcacaatggtagtaccagcgcgccgactcgattttgatatgcttgcgcagcatagtaaagccggattccttcatggcgattatgtcatgcaccagcgcttcatcactcggcgcggtcagcaggccgtccggccaatagccctggtcgagcacacccttgaggaacaccggcttgccattgagatggaagcgcgcgatacccttcaaatcaggcttaatctcaaccgtgcggaacgcgcaatacgagcgcacaatatcttgcttttcctgcgatttcgcgggtttctcttgaatttcctgcgattcttgctgcagcttttcctgctttccctgcgatttcgccgcaccaaattccagcgtcgccgtcacgtcatacaaatacggatcgttcggcgaccacaagtgttcggcccgcgttgcgatttccgtgcgcaccttgcgcatgccagccggcagcaattcgtccgcgacgatcgtgccgtccgcgggatcggctacgacgatatgcagtttggcattcggcttgtctccgccgatttccgcgcgaataaacaatctgccgtcggcggcgcccttcagcgtaagcgtctgcacgtacgcttccggcacgatctccatccacacgctctgccaaatgccgctttgcgcggtgtaccaaatcccctcgcgctcgattttctgcttgccgcgcatttgcgtacccgaatcgttcggatcgtacacgcacaacgcaatctcgaaagcatcatcgggatcgacgaatgccgaaatatcgacgtcaaacggcaaatatcccccgacatgcatccctgcaaactgcccgttgataaagcaggcgcacacgtaatcgaccgcttcgaaatgcagcatcaagcggttcgcatcgccgatctgccgaaccgcttcccctcccccaagcgtcacgggatgcaccaccgtgcgataccagatcatattgtctgggtaaatcgtctgatgcacgccggaaagcgcggattccggggagaacggcaccaaaatcttgccgtcgaacgtttcggggatggccgcttccttcactgcctgcaccgcttcgtcacgggtgagcacagccgcggatttgcgccatttcgagccgttgccgctttcgggaatggatacgatcgcgtaatcccagaatccgttgagcatggtgtgattgccgcgcaccatggttgggcgcggatgctcgttcaggattggcgtgcggccgttttccagtttgcgttcgccgtcttttgcagggcagaacgccttgtgggcgtcgttggaagacagccattcgccggcgatctgttcgccccaaggcgtccacaactgctgcagcggctcctgggaacgcattttcgtaggcgcggctttcagcactcgcttgacgtccaacataagagcctccctgcagcatcgcatttccctcaacttccccattgtaacgagaggaatggcaaagagaaatagcgattgttacggattttgaaatcgattcaatccggattgcactatagatttgtaaaatcgtatatagaaagtcgaatattgcacattagatttacaagtcggatttgcaaaatcagatataaaaagccggtgcaagaacttcgtaattccttgcaccggcaatcagaacaactcaccttagcggcaaatcaggccaaatcaagccgaatccccaggtgaatcagcgaatcagccttccagcttggccttttcggcggcaagacgggccgcctcggcctcacgacgagccttcagctccgaatcgaagcgagcgagctcctcttcgacggcctccggcggaatcttcgcgaaaatcggatgcggcttcggcactgcagtgccggccacgatcggctcggaagcccacggatgcacggtttcgcccagcttgtagtcgccggtgatgatcggatacatgaagcccggcttgtcgagatcctcgacctcttccaagcgcggcaacggcgagaacgtgcctgtgccgccgagagcctcccacaccttctgcgcggaatgcggcaggaacggggccagcaggtggttcgcgtcggacacggcctgggcggcaacgtgcagcacggtgccgaggcgagccggattgtccttgatcttccacggttcggtggcggaaatgtacttgttgatgtcgccgaccacgcgcatggcttcgctcagcgcgttcttctgacgatggttctcgatcagcgagccgaccgtgtcgaacgcggccttggtttcgctcagcaacgcgcgatcctcgtcggtcatttcgttctcgtcgagcgccggaatctcaccgaagttcttgttcatcagattggccacacggttgacgaggttgccccaggaagcggcgagctcctcattgttgtgacgcacgaactcagcccacgtgaagtcggaatcggagctttccggaccggccacggaaatgtagtagcgcacggcgtccacagggtagcgggcgagaatgtccttcacataaatgacgatgccacgcgaagacgagaacttcttgccttccatggtcatgaattcggaagccacgacctgctccggcatgttcaacggaccgagcttgccggtttcgccgcccttggagccctgaccgttgtaaccgagcatttcggacggccagatctgggagtggaacgtgatgttgtctttgcccatgaagtagtagcccggggtttccggatcattccaccatgcgcgccatgcttccggatcgcccttacggcgagcccattcgatggatgccgacaagtagccgatcaccgcgtcgaaccacacgtacagcttcttattcggattgtcgatccagccggcaaccggaacgggaatgccccagtcgatgtcacgcgtgatggcacgcggcttgacttccttgaacaggccgatggagaagttgatgacgttggtacgccagccttcgcgggtcttcagccatgcgagattggcttcggcgagcgccggcaggtcgaggaagaagtgttcggtttcctcaaagcgcggggtttcgccgttgattttggaaacgggattgatgagctcgtccgggtcgagttcgttgccgcaggcgtcgcactggtcgccgcgggcaccgtcggcaccgcagatcgggcaggtgccttcgatgtaacggtcaggcagggtgcggccggtggacggcgagatggcgaccttctgggtgcccttgtaaatgtagccgttggcgaggcactgcctgaacagttcctgcaccacctgctcgtgattgccggtggtggtgcgggtgaacaggtcgtagctcaggccgagatcgcacagatccttggcgatcacacggttgtaacggttggcgagctcctgtgcgctgacgccttccttgtcggcttccaccaggatcggggtgccgtgctcgtcggtgccagacaccatcagcacgtcattgcccttcatgcgctcgtagcgcgcgtatacgtcggagggcacgccgaatccggcgacgtgaccgatatgacgggggccgttagcatacggccaagcaacattcaccaaaatatgactcatggtgcccgattatacaaagcgccatatcccgcattttccatgtatttcggtagttggatttttattggaggatggacgtgcgatcatcgatttcaatcgtttgaaatagtttgcatcataatttgcatatctgccgatctatccacattgttgcattacgtaacaatcattttccacatatccacagattttcgggggctggtggcgcaacggaattcgaatccgctacggtaccgtcatggacactccaccaccccttctgggcaacgatgaccttccgggcccgatgtgcctgaacctgctggcctcatccggcgcgctgtgcaagctcgacagcgcgaacgcctattcatgccacgattcggacacgttgtacgggcggtcctgcatcatcgcgacattgctgccgagccggtccgtggcatgttcacgcaccgccgcatgggtttggctaggcggcaccttccccgaatccatcgacattatcgcgaaagcccactatcgagcgctacgttacggccgtaaaatcaacgttttcaaccgtctcgcaccaaacgaacacaccatcaaagtcggtccgatcatcgtgaccacgcctgttcgcaccgcatgcgatctcgcattgaactgcacccccgaaagcgaatcgttggtttccgaaatcatctgcatgctcatgcaggaatttcatttccgctccaacgattgcatgcaaatcatgcaggagacgaagcatattcgcaacgcgccacaggcgcgcaactacattcttgcgatcgacggaagaagcgacgaatatgagcgcagcgcatagcaggcataaggcgcggcgcgcgacgcacgccgacaggataggtgccgacagagcaaacggattccgcagactgctcggaatccaagaaaaacgcaggccacggacgcatcgcgagacgcatcgggatgcgcggaatctcgcacaccgtgcacagcggacgcgccgcgaaccgccgccataccagcccaaaccgcggccgaaaccgctggtggatccgccgtctcccccaattccattgacgccgctggtggcgtgcagtccggacacaccgcaggacgtgctatggcatatcgcggaatacgcgccgcaactgcgcaaatggctggtcgccaatccttccgcaacaccggcgatgttggactatcttgcgcaagtcggcgggccggacgtggcccgcgccctgcaaatactgctggaatcgttggaatcgtgcggatcgcaagcatgcagctaacacttgcgcgacgggcaatcgcacgataggcaatcgccggacggtaactaatatggactcactgcttcatcgcaagaaccgcattgtagacctgcttgcgattggcaagcgagccgtccgcaaggggatgctcggcaacgacctgcgaaatcgcgtctttgatgcgcagattgtcttcctgcgcacggtcgatcgacagcaccgccaagtcttcgacgctcaacgatgcgggggcagcagcgtcagcctcctcttcggaagcgccggcaacgaccaacaccatttcgccgcgcggcggctcgtcgatcacgctctggcgaatctgcgcgatggttccgcgacggatctgctcaaaatccttggtaagttcacggcaaagcgccatcttgcggttcggaccgaacacgtcaagcaggtcggccatggaatcgtcgatgcgatgcagggtttcgtaaaacacgatggtgcggcgttcagaacgcagggtacgcaggtattgcacgcgttcggaatgcttgcgcggcaggaatccttcatagcagaagcggtcggtgggcagtcctgaaaggcacagcgcgtccagcactgcggacgggccgggagcgcaggtgacgggcaggccacgttcgatggcgcgacgcacgatcgcgaggcccggatcgttgatggtcggcatgcccgcgtcggacacgaccagcacggtagcgccggtttccacctgatcgagcagaccgtcggacttgtctcgctcgttgtgatcgtggtaggccaccacgcggccgttcacgtgcacgccgagacggttggcgagcgcgtagagacggcgggtgtcttcggcggccacgatgtcggcgcgttccaggagcgcaatgaggcgtgcggaggcgtcggccgtgttgccgatcggcgtggcagccatcaccaccgtgccttgcggaacgtcggttccgcacacgagggcgtcaagccccgtaccagactgttctgttccagactgttccgccgctgtcggcgattctgccatctccgccgtattcaccattcccgcagttcccgttacttctgccgtattcgcactcaactcattcagtttcaagtccaacgtctcattcatgcgttccatgccttcagcctatccaacgcaaaggaaaacagccctccccgcgtcctaaacccccaatcgctggaacaatccggacacaaaacagaccctcagcggggtgattcccccacccactggaacaatcaccccgcttacagccccagtaacgtcccaaaacatccagacattggaacaattcggacgccaacaggcttaaaaacgtcctgattcttccagtgactggaagaatccgccctcctacaagactaaaagcgggcagattcctccaccgactggaagaatccgcccgcaaacgcatgtttacaccgcgcacacgtacttacctcgtgtacatacgtggcagcgaatcggccatgcgtatgaagctgttgcgcgcgaaagcgttgaaatcgcgcgcatacggcgattccggcagcggagtgccatatgcgcccgtgccggcagcgcccgaatcattgccccagaccgccggatatgcgccggtcacggcatgcacgtcggaatccgtatcgggggtaatcaccttgctggtttcgttttgatgaccgaacatggagaattttccggccgccgcatgcaacgcttcgagcagcgcccgcgattgccgattcagattcccatcaaccgattgcgcaagattttccgccacgattcacactcccttgtatttgccgtattcgcctagtcttgcattgccccaaccgctctcgcattgccttactgctgtttccacgctatcttccgcgccatcgaaacacactttcgtaccgtcaacatgcgcgattcgtgttcagcggccccactatttgatttgttgacctcacgattccgtttttcgccgccttttttcaaatcgtgaggtcaccaaatcaaaatcatgaggtcccccccccccccaaaaaaaaaccaaaatcgtaaggtcacaacgccaaatcacaatgagcgatacgcgatataccggatatatcgcatactctaaagccaaacagccaaacgccaaacaccaccaaaccaaaatcacccaccgcagttggcactttgcgtccgtttgtgcagatttgccaaccgtcgggcattactaggcgccgcattagagggccactggtaggctgacattggttccgcgaggccaacccacacaaggcagcctgaaccacttaattttggacgtttagatgtaaggtactcacagagagcatttcatgggaattatcaacttcttcattaatctgctcaaggatccgcgcacggcgatcgccagctggatctccatgggcgtcgcccccacgcttggtttcatcttcctgattgtgttcgtcgaaaccggcgtcgtgttcttcccgttcctgccgggcgactccctgctgttcgccgccggcttcttcgccgcgcccgacgcccagaccggcgtttccgcactaccgctgttcgcgctgctgcccgtggtctggtgcgctccgatcatcggcgaccagtgcaactactggatcggccacttcttcggccgtcgcatcatcgaatccggcagagtcaaggctatgacccccgaacgcctcgccaaaaccgaaggcatgatcgaaaagtggggcccgctcgccgtgttcctcggccgtttcttcccgttcatccgcacgttcatgccgttcatttccggcatttccggcatgcgttggagccgtttcaccccgttctccgtgctcggcggcctgtgctggtccaccctgttcacgctgctcggctacttcttcggcggcattccggccgtgcagaagcatttcgaactggtcatcattgcgattctcgtgctgtcgctgattcctaccttcgtcggcttgctcaaagcaaagttcgacaaaaagaaggctgataccgcgaccgcggaagcctgatcttacgttttctccttttcttgcgattgcggtgtctttcgatttttcggaaggcaccgttttcgtatgctttcgcatgcttttcctgcaagggatattccgcaacacgcgaatctcgcagattgcattcgtacagacttcgtactagaatcgcgagagttgtcttgcttagcgtgttgctagacatgacttggggccgtagctcagttggtagagcgcttcgttcgcatcgaagaggtcgcggtttcgactaccgtcggctccactaagcccgctgcattcattccaccgcagcgggctttttcttttcctagccaccagacaaatctgccatacgtaagcgagatggggcgaaaaatcaggcttgggatacgcgctgacgcacgaaagcgtcgagcgaggccgcgtcaatgccctcgtagcccttgatcgaggcgaactgcgggccgttggaattgtcgatctgcatgaacccggtctggccgatcgtcgtcgcgccggaggcgacggccgaacgcaggcccgacatggaatcctcaatcgcaatgcagtacttcatatcttccggagcgatgcccaagcgacgacccgcctccaaatacggggccggagacggcttcttctcaacatcatcatcgccgcacacgtagcccgcaaacgcgccagccggcgcttggacaaccagattctccgcaagatgacgcggcgacgtggtgaccagcatcgaaggaacgccagcgtcacgcagcgcgacaagcacgtcttccacgccttcgatccacggaatgcgctcgaattccttttgggcgacgtaatcgatcatgccctggccgatctcttcaatcgacagctggcaaccatgctccaccatgcgacgggccacatccggaaccggcgtgcccgaaccctgccaggcgagctcctcatcccaatatccgccatgcgcggctgcgattttcatctcaccctcatgccaatacggttcggaatcgatcagcgtgccgtccatatcccaaaacacggccttgatcatcaggttcgtctcggtcatgatgttccttccctacgaccgtcggacgcggagcaccggatttccgggcagcgccgtccatcgcgacttccactgccatttcagcagggcggcaagacggcagcattcgcgagtcgcggcaaaacggcagacaacaaacaggcatacaagcgaggcaaacgaaaagcgcccggacggtcctccatccgagcgcttcccatatcgacgcaatacttcgcgcctacgtattcgcaaaatcatccgatttttttcacgaattatcggcaacccccatcgctataatccatgaaattcgaaaatttcacttgtatcgggagatttgaaattcactctccctgattttcactgttttccacagcggtttcagcggccttttccgcatcttccgccttccagcgagcgatgcaacgttccacgcgcttgtatccgatgatcttcggatcaagcccggcctcgcggaaaatcgcggcaggcgagccaccttcggcatacctgcgcatgcaatcatcgcgaaactccttggagtaacaaatacgatactgggtgaccgattccacggcatccagagacccgagatacttgcgggtcttagctgtgaacgcaactcttggcactgtacgctcctaacctttcctgttctcgccgcatatcttaccccctcctccatgattattcatgggcaaagagaaccatctttcaccgaagcaccttgacaacccgaagaatgacagttagaacgcggatactcaacattatttcccacaacgacgacatcgtcgcaggaagcaatgcatttggtaaaaccaaataacaaaacaggcatatctgttgcaagatatgcctgtttttgaattttttttcaatgttttctgaaaatcagtcaatcccccaaagcacgatagacctggaaatcggctgagaaacgggtttacccctctcaatcccctcgttttcgcctgcgacacccccaccgcgcgtgtcgtacgcatcagccgcgacacgcgcggcctccacggactcgcgcgacggcagctgacgggcgtcgacctgaatctgccgacgccacatgcgagcgcggcgggaacgttcgatttccacaatgtcaccgtccgcatcggccgcgaacacgctggaaccggccggccggcgcaatcgctcgacttgccggcgcagctcgcggttctcctcttccaaggaaaggatccgcgcgatgccagccaggttgatgccttcttcctgactcagctgctgcgctttcgcaaggcgcgagatgtctcgcagcgaataccggcgagcgccaccgtccgtgcgttgcggcaccaccagtcccaaacgatcgtattggcggagcgtctgcggatgcacgttggcgagttcgccggcgcgaccgaccgtgaacatcggcagttcgatgtcgaaaccaacttcgtccgccccgtccagatcggccctgccggccacgatcgccattgcgcacatgtcgtacagcattttggcctgccgcgccgcacgggcttgggaggtccgggatgcgcgtgccatggcaatcagcgctccttggcaagttcgtcagcgaaatcgccgcactccttgtcgaattccttcgccgcatgcttgactttcaggctcggcttgtcgggaatgcggatttgcacacgcccgatcagatcgccgtcgccctgcctgttggccacgcccctgccggagatgcgcacttcggtgccgctggacgagcctgccggcactttgaaggtgacttcgttgccgtcgatatcctgtgcggtcactttcgcgcccgccacggcctgaccgacggtgattggcagatccatgatgatgtcacgattgcgcaggctgaatttcggatcttcggcaacattgatctgcaggtacagatcgccgttttttccgccgttacggcccggcttgcccttgcctggaatacggattttctgcccgtcacgcacacccgctggaacatgcgtcttgaacttttttccgtcggcagacagcgaaaccgttgcccccttgaccgactggcggaaagtcagattgatcttggaattgcggtcttcgccatcttccggctgcgcagcctgctcgtagctgcccccgtagggattgccagccccggcagggccaccagcgccgccaccgaacatcgagaaaatatcgttgatattcggattgccgccaccggtctggaagcggatgcgcgagccattgccgcccgtgccatacgctccagcgccagcgccaccgccgaacattgatccgaaaatgtcggagaatgcccccgcgtcgaatccgcccgcaccggaaccgcctgcgaagcgcgcgccacccatgccgaactggcggatggcgtcgtacttctggcggttgtctttgttgctgagcacgtcgtacgcttcggagatgtctttgaacttctcctccgcctccttggtcttgttcagatcaggatggtacttgcgcgccagcttgcggtacgctttggtaatctcatcgtccgtggcgtctttggagacaccgaggaccttgtagaaatccttgctcagccattcattctcagccatgatgtgcctcctttcacgaggttgctgatgtcaaatgcctgttgttgttggaatcgctgtcactgcgttagctctgcggggatgccacaaccacgcgagccgcgcgaatcacgcggtcgccgatgcggtagccggcttccaccacggtgtcgacggtttccttctcggcctgcggatccggcttgtgcaggatcgcgtcatgcttggtcgggtcgaaatcctcgcctttttcgccgaacttctcgacgccgaacttttcgaacgccttgtcgattttggcggaaacggctttgaaggattcgtccatttcgctgtgttcgcgaatgcgatcgatgtcatcaagtgctggcagcagtgcggtcagcacgtcgatgatgccgtgctggcggaaacgttcctgctccttctgcgaacgattgcggaagttgatgaattccgcacgctcgcgctggagggcttccaagtattccgccgcttccttcttggcctggccaagcggagtcagcgtatcttcaccatcttgcgtcgcaccatccgcagcatcgccgttttcttgcgattcggaagatgctgcgttcgctgcagtttcggaagttgctgcagaatcggaagttgcactagctgcagaatcgccattattctgcgattcctgcgatgcaccggctgcaggggcggcctgcccggacaggttgtccatgtcgggcaggtcgttcagatattcgtccttgttgaagtcggacatgattacttgttgtccttgtcgtcatcgtccacgacttcggcgtcaaccacgtcgtcgtcagcgggagcggaaccggcggcgcctgcggcacctgcagcgtcggcggcaccctgctgtgcgtagagggcctggccgatcttctgggcggaggtcatcagctcgctctgtgcggacttgatcttctcaatgtcctcacccttcagggcttccttgagctcgttgaccttatcggtgacttccttggccacatcgtcggagagcttgtctttattgtcgttgacgagcttctcggtctgataggcgaaggattcggcctggttgcgggtctcggcgtcttccttgcgcttcttgtcttcggcttcgtgagcttcggcttccttgaccatgcggtcgatttcgtccttgcccaggccggaaccgccggtgatggtcatggactgttccttgccggtgcccttgtccttggcggacacgtgcacgatgccgttggcgtcgatatcgaaggtgacctcaatctgcggaacgccacgcggagccggagcgatgccggtcagctcgaaggtgcccagcggcttgttgtcgcgagcgaactcacgctcgccctgatagacctgaatgagcacggacggctggttgtcttcagcggtggagaagacttcggaacgcttggtcggaatggcggtgttgcggtcgatgagcttggtcatgatgccacccttggtctcgatgccgagggacagcggggtcacgtcgatgagcagcacgtccttgcggtcgcccttgatgacgccggactgcacggctgcgccgactgccacgacttcatccgggttcacggactggttggcttccttaccgccggtgagctccttgacgagctccttgacggccggcatacgggtggaaccgccgacgagcaccacgtggtcgatatcggaaacaccgatgccagcgtcgtgcagcacgttgttgaacggggtgcggcagcgacccagcaggtcggaggtcatgctctcgaagtgtgcgcgggtcagggtttcgtccaagtgcaccggagtgccgtcaggggtcatggccaggtactgcatggagatggaggtgctcgaggaggagctcagctccttcttggcctgctctgcggcttccttcaggcgctgcagggcgatcttgtccttgctcaggtcgatgccgtacttgttcttgacttcgccgacgagccagtcgatgatcttctgatcccaatcgtcgccgcccaggtggttgtcgccgttggtggcctgcacctgaatggtggagaagccgtcgtcgtccttgccgatctccagcagggacacatcgaaggtgccgccaccgaggtcgaagaccaggatggtttcgtcttccttgcccttttcgaggccgtaggccagtgcggctgcggtcggctcgttgatgatacgcagcacgttcaggcctgcgatggtgccggcgtccttggtggcctgacgctgagcgtcgttgaagtatgccgggcaggtgatcacggcgtcggtgaccggttcgccgagataggcttcggcgtcgcgcttcagcttcatcagcacctgtgcggagatctcctgcggagtccacttcttgccgtcgatttcaacggtccagtcggtgcccatgtggcgcttgacggagctgatggtgcggtcgacgttggtcacggcctgacgcttggcgacttcgccgacgaggatctcgccggacttgctgaatgccacgacggacggcgtggtgcgagcgccttcagcgttcacgataacggtgggctggccaccttcaagagttgcgatgcaggaattagtagtacccagatcgatgccaactgcgcgtcccataacttgtctcctttgtagataggttcgctatgcgttttctgttctattcgttctttcgcccgagtttcggtttgccgcctcccggactttccaaaacttgagcctacaccactcaactttgaatcgcaagcgattattcccaaatttacaaaaaagttgagctccctttgctcaactttttatcagacgcaatctcaagtgcaacttcagacgcaatctcaagacacgacttcaaggcgcgatcaccattgaaaagcagccgaaaatcgcaatctcaacaaaacctgccgtctcaccatcggcagggcgcgagcgcaatccgtcaacgtttcaactgcctttcgttgacgaatcgccacctatcagctatcagcgatcaatatcaggccaaatcaggccgcaccggaacccgcgttcggattagccagattggcggcgaccggcgcaagaagcacacgacccgtaccgcggtacacgttgaccaagccctcgccgctcgcagccgaaccgatcagcgtcttcgtggaacgctcgaccgtgaactgcaggccgttcgtccacgcgatcgcgaaattgccgtccaccttcagctcgtcgttctccaaatcgacggtcacgatttcggaagcgggcaccggcgattccaacgcaaccgttccctgccccatcagcgacaggttgaacaggccctcgccgccggccaccatcgcactcggacgcgaaaccataaccgcacgctgctgaatcgtggcttcgcaagcgtagaacaggccgtcgttcactgtgatcgcgccgcccatctggctcggatcaagcagcagcacatggcggtaggtcggttcgagcacaaccacgccgttgccgtgatattccggcttgaccgcggactcgttggtgaccgctccacgcgccagcttgccgatgaaatcgccaacgcccttcacaccggtcgtcacttcgacatggccgacggtccactgcatggcgcccgcctgcacaaccgcgccggtcttgccattgagattgcagaccagctggcggcggcgcacgttcatttcggacgcatagtaggcgtccatggcgctgccgtaggtcacggaaaagtcgcgcttccattccatgacctggaaaatgccctgctgcgcgacgatcgcggcatcgtcattatccgtcagattgtaaatacgcacgaatgctcctttgctggtaatactttgttgataatactttggatgtcgagagataatctcccggtttgcgagatagacatctcaaaggatattgtctcacaacgcttgctgcgttgaacgacccatctcattttggatttgcggcccgccctgtctgcattgacctcacgatttcgatttggcgacctcacgattcggaaaaaggcttaaaaaatgaaatcgtgaggtcagaccacaaatcgtgaagtcaccaaacctgaatcgtgcgatgaagcaaaagatccggaccacactgcaatgcgtgcgatccggatcttatttgcgctcttcagatctcttcagattttcagcggctgatcttggcggtcttgacgatcatcgcgattgcggccagcatggcgatcgcaagtgcggcgatggtgatcgcggcaccggtgttgccgagccacttgtcgttcatagtgcacacggtcgggttggcgtccttggccggatcctgcgcggtggccttggacgggttgaacttggtaggcatgttgccgtcgctcatcagggcgagcaccggttggccctccttgtattcgagcgcgttcattgcggccggatcgttttcgacggtctggtagcccattcccttggcctgctcccacacggtcttgccagcgtattcgccgccctgcacggtctggcggaagtacttggagccgccgccgatggtcacgtcagcgcgggtatcgagcagctgctcggaaatggaaccgatgccgccgttttccttgagctggttggcgaggcagcgcttgagcgcgtcgttggagctgccgtcgattgctcatcttgttcttctttcttcagcctgtgctgtattgcgattcccacgctaggttccgcaaaccaacttccgaggcgttttagacgaacacaatatgaactctcgtcttcacaaagtgaacacttatctcaaatcctctttccgtcaaccatcattcccaataccccctaaatgctgaattatgactcatgcttttcccgcatgaagtgcaaacggtcaggcagaggcgcgggcggagcgggtggccttgacggctacgaagaagctgcggatcaggagcacgcacaggtagatggcgaacatgatcgagccgacgcggggcgacaccgcgcccgcaatccatgtgccgaatggcgcggtaacggcagctaccaagccaataatcagcgcggccttcacatgcaccagcttgcgcttcaggtttgccacgctcgtggtgatcgagttcgggaacatggccagcagcgacgtgcctcgcgcaatcagatcggaagcgttgaacagcatcgacagtgcgggcacggcgagcgccccgccgccaatccccagcagtcccgccaatatgccaatcaccacgcccagcagcaccaggcaaactccggtcagcacgctcatcgtaatgtgctggtctcgcgacggcacgaaacttatctggttcgccaccacaaacacgaggaacactacgaaaatccaccgcaatacgagttccggcaagcgcgaaagcaaccaactaccaatctgcccgcctacgaacatgccgcaaaacagcagcagcgcggcgagccagtccacgtttccgcaagtcgcgtacgaaatgacgccggaaatcgagatcggtacgatcgcaagcattgacgtcgccgccgcattgcgttgcgtcaagccgagccataccagcgcaggcacaatcaccgtgccgccgccgatgccgaacatgcctgaaagcagtcctactgccacgccgacgatcaccagcaccgcaatgcctcgcgcggattcgtcgagtcccacaggatccgcaccaaatagccgatccgctttctcgccgaatttcccgctcggctgcacactcgatcgcacactttcttcagcgcgttcaacactttcagcattcgaaatattggaaatatccgatttcttcatctctcccctaccatcgcactttcttcatcttgcgataattgcgatagttgcgatagtacattcccgcacatcgcagcgtcgcaagaccggcagaatacgagaaggaagaagagaaactacgcccgtctgccggacgagtggcgcccggcagccacacgatcggctttcacgatgcgcccgcgccgccacagccgtgccagccatacgcacgcgaatccaatgatcgacacgagcagcccaatcacaagagccgccacagccgtcatataccccggctcgtcgtacgtggtcgcgtccggcactttcgggttcggtatgcgatgcccgcgcacgagcagcctgtgcgagttcaccccgtatggcgtgcatgtgatcagcgtcgcgtagtctttgccggattcgatgttgagtttgctgatgtcgctcggcagcactacggaaatttggtcaacctggtacgtgtaggtttcgtcgagcacgtggaatgcgaacgtgtcgcctttttgcagttcgtcgagaccggtgagcagtttcgcgctgggcaatccggtatgcccggaaatcaccgcatgcgtggtttcgccgcctacgggcagtgacgttcccgccaaatgccctgccgcgatttgcagcacgccttcgctggtgccatggtagacgggcagtttcactttgatgcgcggtatggtcacgtatcccatgatgccggtaccggttatgtcgagcgtgttttcgtatgtttgcttctgctcgtcggtcaggtgccagcggtcgccgttcgccgcgagcgcctcgttgtaggcgtgcgccgcgtcgagcatttgctgtttttcttcgccggagagatcttcggtttgttccacgtagcttgccacggcgtacgactggtgcatgcggttccaccagtcgctgaatgttgggtatgcgatgaggcagatcgcgccgatcatgaatattgcggatattgcgattaatacgtcgagcagcgcgttcgactttttcttcggtttcttcgattgttccgaagattttacagatttcaaagattccgatttcgcactttccgcgccttccgcagaaccttccgcactttccatgccttccgtgctttccgaaaattcagcgaattctgagaatccggcaaagtcggaagagccggcaatatccgcggaatccccggcaatcttacggcgcgcctcagcagtttcacggcgcgcttcagtgctcggttctcccgattcgctgtttccgctccgccgccgtttcacgctactgttcgccttcccgctttctcgcgatcctcactacgcctaagagtaccaatgctgcggcgcagatggcggctgccatccaggccacgctctgcaccgccgagccggtgtgtgcgggcggggtttcgggtggtgtgtgcgtgttggtgatggtggtggtgtcgccttccacgtcagagagggtggtgtacccgctgggtacggaagcttcgaccaccgcccactggtgtgcggaggaaagtcccgtccacgaatgtgcccacttgttggactcgttgagtttcacttcttcgaataccacgccgtcacgcaataatttcacggtgatggcttcggggcgcttgccgtcggagtcattgcgatcgttccacactttgcgcacggtgcgttccagagtcggcttgagttgggtggagcattcggtttttggttcgatggcgagttcgcgtgatccgttggagacgccgtcttgcggcatggcgacgagcatgttggcggaagcgcactgccagtaggagtcttcgtcggccgttccgccaacagcagccgcgccagcagcgccttcgactttcacgctatcggacacgaccagatacagcccgtcttccacgccggcgaacgtgagtcgcccggctttatcggtttcacccgagtccacggctgcggattcgcttgccccgttcgccgcgatgagtccggcgagcgtgttggccacgtcacggtacacttgcgcgtcatatccggttactttcgaccagtcgatcgggtatgcggtggagtcggtgaatggtgcgacgggttcgaagtttgcgccggacgagacttgcccgactttgtatagtcggaaggttgctctcggaatggcgaagtcgcctgttccagcggctccagaatcggaagcgcctcccgcattagattcagccccgtcattgcttttgtgttgatacgtaatggcgatgctgccgctggcagagtctgttggcgccgcaaccgcatcgcgagtggtgagtgcacagattgcggcggcacatgcgacggcagctgcgcagcatgttgcgacgatgcggcttgcgatcgtgtgttccttcattgcctgcccctcttctgtgattctttctgtgaaaactagaaatatcaagtcgcccccaacttgcgacttggaaaaattagggagtcaggctgaattctcgttagtttaggcagtttacaagggatttgaggcaatccagcctgacatatgtgggtttagttattgttcaattatttttaaattatgatgattgtgatgattccgctgttgccatgcggaggtaagtgcatggcaacagcggtttcatgtgtagttattttcagttatggtttttgattttcagttatgttgactgtgatctgtgagatcaggcgttgcggcgacgcagtgccatgaccagggttgcgccagcgagcacgaacactgccacaccagccacatacagcatcaccgtacccatgccaccagtggatggcaggttggagcccttgacgttgacgacgtcggcggtcagagagccggcactcttgtcaggggcgaaggtgatctcgccggaggccgcattgccgttcaggctggtcaggacatccgtacgctcttcggtggtccactcgaccttgtgatcggcggtcacggtgaaggtgatcggcttgatggtgttgtagccggccggggtcgtggtctcggtcaggatgtagtcgccgtcatcgagaccggagaaggtgaaggaggtgtccttgcccgcggtgaactccttgacgagctggttgtcggcgtccttaatcttcttttcgagcttgaacgcggcgcccttcagagcttccttgttctctttgaccttgttcacgacgaccttataggtgaagacgatgacgttgtcccacggggtctcgccggtcggggtgctctcgccgccctgctcgaagttcgggttgttggagaactggagcctggccttgttcttgttgccctggttgccgagcacggcctgctcggtgagcgtggaggtgtagtcgacggtgatcacggagccgttcttggcggcggccacggcggtcttcaaatcggtgaacacaacctcgaaggtgcagccgtcagtgagaccggtggccttgaccgtgtagttggcagcatcaacagccttgccgtcgacggcaaccttgacggaatcagtgttgaaggacagacccttctcctcgacatcatggaaggcgaggtagtaggtcttgtaatcggtgtagttcttcggcagggtggccttcagctggaacgggaccttatcgttgacgtcgtagtcagcggaatcctgccagtcggaggtagcaccagtggtgtcgttggtgtcctggaccttcttctcgaaggagggcacgtcgctcttcgggctgatggtcacgtcaccgacaaccttggtgatgtacagggtgttggcgtcgttgtctctcacggagccgtccttgtccttaatgaggtagtagcccggagcagcggagtaggtcgtgctggtcttggtcagtgtggtaatcggggtgctgtcgagcttggcgaacgtcttgatgacgtcgagcttgtcctgatcggtcttgccttcgacgttcacatcggtgagctgcttcagctcgacggcggtcacctcagtgcccttggccttggcaccgttctcgccgtacttgacgttggagagcacgccgtcggacaaatcaccggtgaagatctgatacacctcgtaggtgtgatcctgatacttggtatccgtagggaacgtaattgtcggattggtggtggcagtcgtattttcctccgccatggcggtggaggcaccggcgaaaccggcgacggccattgccgcggtggctgccacagcgacgaggcccttgagaaccttattcattgttctccctttctttcttgtttgaaatttttggaatcttgagttattcgtattcagttattgcctagagggcagcgagttcgctacgctacggaccactcccccttctcctagacgcttccatcattgccgcctcctgaccttgagggccattccagccgcaacaacacctatcaacgcagccaccaaagccgccgcgtaaatccaataatcgccagctccaccggtccccggcagaatcacacccggctggttcttgatgttgccaccattgacagtgaacgtggtctgctcgttgtaagcgcttgtacctttagtattgaagtcggtgttcgcgtaccaattgccagcgatgttgtcgccttccagcgggccgatgcggaacttgtgcggagtggcgtcaaggtcgtatccgtcaggagccttggactcgatgagctggtactcaccccagaccaagccgctgatcttgaatttgccggaggcaccatccaaatcaacatattcaccggtctgggcagagcatttagcaacgccgttctgcccatccacgcagtcggtgaccgtgccaagtgtggcgtccgaagtgacatcggtgtacttggccacgccattgtcccacgagaaggccttcgtctgcttgagggtccattcggaaccggaaagcggatccgtattgttgaaatccgaagacaccttggtccatgtcacggcaccagtcttacgggtgtttgcgatcttgttgccagtgttatctgcgccaaacgccgggctccaagtagcggttccgttggcgatggtgatcgtgtacaccgtcaaggacacttcgtaaccgttcggcgcggtcttctcctgcaggcggtacgtaccgtctgcgagatcggagaccttgaacttgccggccttggtatcttcatccttcttgctggaaacagtgctgttttccagcacgttcaccacattgctttgggtccgcaacacggaggcgaccgcgcgatgctcgcctctgcgggcagcaacacgacggctactgtatgcggcggtggaggtgacggcgcagccggagggcgcagtgccaagtatctcagttgcagtgttcaacgtcacaatgtcgccaccgttgaacgcaaaaccactgtttgcatcgggacgatagaaggattgcggcgtagtccagttggccttgtctctgcggattcggaaactggcgctggtaggcatgacctcattgatggtgtacgacacgtaaccattgcagccactggcaaccgtcatctcttttctgttcggcggatcgccgctgtccgacggccaattgccagttgcggtcttccactcaagaaacagcttctgaccattattctggttgaagtcatcttgcatcttgaagaacaccgtggtggtggttgccggcggcttggtcacgttcaccctcagggtgacggtcttgctcgtacgagtttccttcgccgtaatcgtcaccggcgaagaagtcaccttattcgcggtcaacgtcacgcttgtgccggtgttggcgctcagcgagacgttatccgcattggaagtggaccatgtaacggtgttgtcttcaggagccacagaagcaatcagattaagggtcttgcccttctcaagattgatttcctgaccattggtatagccgttaatcgacacggaagtctctacggtcacgccggaaacttcgacagtgaacgatgcggtgaccttaccatcagccgacttcacggtaatagtggtattgccatcgccggtcggagtgaccaaaccgttttcgctcactgcagccacggcgctgtcggcagacgaccacgtcaacttcgcattgtcaatgggcgtaccgttctggtcataggccaccgcgtggaattgctgcgcagtgctgttcgtaaacgacacggaagccacttcgttattattcgcaccaaagatcttgacggacttgacctctgtgccggactgatcgtcaataatgttccaagactgctcagcagtatcgccattcatcttggacagcttccacgttgaaccggccagcaacgtgttgttgtcggtgccgtcgaccttctgccatgtaatcgaagagcccgtcttcttattgacgattttgccgtcagccagcagtttatccgcatctacagtgattccattaccaacactatcgaaaaccttgacgatgcttgtcgcagcgtcagtggtattaccagtgttgatctggtaaatgttggtgttctgcgcataaccttcagccgtacccgattccttaaggaaataggtgccgttcttggcgaggttgcccagctggaacgaaccttccgcatcagcatcatcgttccaaccgccatctgcgatggtggcgagagcgttcgtaccgtttaccgcatcttccttcttgccgtacacggtccagctggttccgcccaaagcgttaccagattcgtctaccttgtcccatgcgattgccgcacaagaagtagaatacgagccgttccacggaaggttgtggcgttcctgatccatgtcgaggatggatgtggtttgttcgccggactcgttgatgaattcgtcgttgattttgtgaccgtcagtggcctcgccgtcggttcgcttcacggtggaatcggggccgttgagcatttcgaaatcgccaccgacccatacgcggccgttggtgctcacgtggctctggaggctgcccttgggaacgaggatgctgcccatccatgcggcggacgggtcgtcggtggctttcatatcgtgcgaaatgccaatctcgccgttaatcgtggtgccccacgcgccatggttcgtagccgtattcgtgttgtggttgctgacctggattttgcccgtcgcctggccgccacgaatggtcacctggcttgcgtccgcgaaattccacatgatctgctgggcgtgcttcgcgtaattgttgtttttctttttctgctcctcgtaatccgtatcgcctgttgcggcggtgacgaaatcgttggcgatgttgttgtcattccaccagaatcgccagccgttgtggaagtcgatggtctggttttgcgcgccggtcacgttgataactacggacgcgttatccggaatgttgacgaatttgaaatcgatacccgtatagtcgctcgaattcaattcggatgcgggcagattgaacacctgcatggtcttgcttggatcagtgctggtgaaggtgatcagcttctcgtggctcagctggccatcatagaacgtgaacgaattgcctacgccgccgttcttgcggtagtcgtacttgtaaatcgtgtagttggatgccgcagcttctgcagtgcccgtcgcaacggtaccggttgccggcaactttgttccggtgttcaaatccgtggagagcttcaaaatcttctccccatacttggaatagtccattccattcacattggacaggttgttggactggttccattccaccaagctgggatcggtgccaagagtaggggtaatatcaccttcagtgtcgttgatgccgttcagtccgcgtacggaatcaatagaatcattactgccccaaacgccggttttgctgccagccaaagaagccttgtacccgtggctgtttgtatcattagcatccgtcttgcccagccagcccggcgcaccccatgcgccaaccttgaagcccatcacggacgtgctagtattgccgccgaccaccaaagctgtcttgccatcggcgggacggaactgtgaaccgaaaccaaccacaccccagcggaagccacgtgaagtgtaatgctttccaccggttgtaccagtgttccacgccttccatgcgtccttcagcggatgcatcgcaaggctgccgttgaccacggtcagaccttcagcttcgacagcgtacgtgccagttggaccggtttcactattcaaattggagttttctttgccgcccacgtacatatctccgccaacgtacgtagctacaccggtatcggaaccttccacgctcatatcatcgcccaagccaatagaagatggcgtacaagtagaaccgtctttcagcccgctttcatcagctttggcattgtaggcggggaggagggaagttactgcgacggtggccatcatggctaccgctatggcggcggcggtcagggagcgggtacgcgaaagcgcgcaaccggttgccgatcgcgttcctgcatagtgtcgtggtgcgttgccgacaccattacgccattgcctcatcttgtcccctatccgtaaagtgttcacccttctgagcctctcaactcgagggttgatatcctttgcataatgccgttatcacttctgttttacgtatagcttctgcgctgttcccatctccggcaacacagccggaaacctctgttttcctctgacctacggtttactatgataacctttgcagttatgaaaacaaaatgaaacagaaagaacccacatcccctccccccgatacgttttttcgccccctctcacggggacaacgctttaaagcctgatattcaacggtttgtcaacgattgcaaaatcaaaaaacacatgctgatcattgaatgaaattcatcattcatcagcccccgattggcgtgtcatgaaacacatcactgcaaattgtttcattttttttatgaaaacgtatgccacacaccgtgactacagtgggggtatcccttatcaatccaccccaggccatcacaatcagcccgtcggcattgacgggctgcggaaaggtaatgagactcggctctcagcgaccagtgccgtacacggaatcggtgccgcgcagtacgagctgggcgcgcacaatctcatgcgcgttctcaagcggcttgccttcgataagcttcatggccttttgtgcggccgcgcgacccatcgcatacggatcctggcgcatggtggtcaggttcacagtgtcggcgtacggcgaatcgtcgaagccgatgatcgaatagtcgcgcggcgtgcgatgcccataccggtcaaggcgcagcacgagcggaatcgccatcatatcggtctggcagcaaatgccgtcggggaactcatccaacgcaagcagcgcggtcaacgccgaatcggcgaacgttttgccgcgcggcacggaaagcacgcgccacttgaaatcgtgcgtgccctccatggtcttgcatgcgcgaatgaagccctgcccgcgcgcgtcgatcgacgaattgatcgaatcgactgcatcggagcacacgtacacaatgtttttatgcccaagattgatcagatgctgggcggcggtgaacatgccgtcctcatcgtcgatggagatggtggcgtcgaagccgttttgcgtcggcgtattgatgccaataatcggtacgtggatgcgcttgagctgctggatttcctccggttcgacgccgaacgacgttacgaacacggcgtcgacgttgcgtcgcaccggaagattcgtaaagaagtcacgcctgttctcaccggtatcgacatgctggaacagagagatgtcgtatccggcatcatgcatgacggaattgattccagcgaatacttccatattgaaccagctggtgatttcctcattcatcagcatggcgacacggtacgtttgccctgacttcagtgccgtcgcggaacgggagatattaaaatccaaccggtccgcggtgtcgagcaccttacgtctggtacgctcggaaacgagctccggacgcgtgaacgcgcgcgaaaccgtcgaaatcgacactcctgcggccttggccacctcacgaatgccagccttgtccatgtcagcccctttgcagctcacagcatcatcgcacccctgccaacagtggaacgggtggtatttggagcgacaacgctctctcaatctgctttcattatagtgcgaacgttgtcaaaactcacgcaatatgatcaaatttcatgcgacagccgcgcaaatcagcaaaattaccggatagaaggcgtaaaacacccacttagtccatgaatgtttgtacccgagtttgccattgtagtagtgcaagaatgcaacaccgacgccaggcgcaatcatcatcaccgcaccgaacagaccggccgtgaacatcatggtgttttcacgcgagcgcatcagccagaaaatcagcacgaaaccaagcgtcaccgcacccagactcatcagatgctggcgcagtccgacacgcaacagcagatcccacaatgcggcaaccactaccagcacaatgtcggagatcacgagcatggcaccctggtagcgctgcgccacccattccattgctgcgagcatggcgaaggcgatgaacagaccgaacaccggattctgcgagccgaaatcgaacggcttgcccgaagtggcgagatcgtacggcacttcggtgatcagcgccaacaacagcagctgcacgccgtatgccacgcgattgcgcgtctgctggaagccttgtaccagcagccacgcgtagatcggcgcggcgaaccacgacaccacttcgcatagcaccatggccgtgagcgacgtcatgttgttcgtgtcggatccgaaaatcagtggcaccagcgtggtactgccggcggaaagcaccagcgctaccgcgccgattaccttgagctggaatacactcaatccgcggcgctgctttttcttgcggcgcatgcccgcaaagccgatctggtcggtgacgtcggttccggcgccgttttcggtgtagccttccataagtcctcctcgagttttcctcgattccatcgcgcaagcaatcatgcgcgcacgtaatcgtctgcgcacactgtgccacgtcacgacattacgccgcggtatcgcgttgcggcatcgctgccatatgcggagcttcgcgtctcacgcgcttgcacagcattccgcgcaatatgtttttcacgtaaccgttgtgcgacatgtttcacgcgattgtttcacactatgtctttcgtgctttcacgtagctttactcgcatcatcttgccattgttgcaaaaatcctgcgaacgtatgctgcaaatgtatgcaacataccttacacgctttacgaaaggtgacccccgtaaacgtggcgtacgccgcgcaatacgcgcaacgcaacgcacgccccgcaatacacgagcagtacgcacgcaatgcgaaagatcaggcgttcagcacgtaatccagcaatccttcataatcggcacccttaaacgaacgcaccgcataactcgacgcatccggatcgtcggccggcgaaatctccgtgcggaaatacacgccgtcgatgcccgccgaacgcgcaccgacaatatcgttcttctcgtcattgcccaccatcagcgcatgcttggcggtaacgaattcacggtcgagcgccagcatatacaaatcgcgcgcgggcttacgaatcttttcctcgctggagatgatcacgtcgtcaagcacgctggcaagtcccgtcatttccaactcggcacgggtgtagcaggattgcgcgttgctgagcagcgccacgacaatgccggcttcctgcagtttttcgatcatttccagcgcacccggatacaggcggatcatgctggtgctaccctgacggaacgcccacgcggccttttgagcggcctgcggcaacgccagcaaccgttccgcctcgtcgttgcgattcatgagcagcgagcggtacaccggcagcacgtcgaactcgtcccacccattgcgaacgatggcacgattcgactgatgcagcatttcgcgcgcctcaagtttttcgaaacgttcacgcagtgcctcaaccgaatcgtattgcgctccaagctcgcaagcagcgtcatacaaggcctgccaggccgagtcgcactgttcgtcggtacgtatgtcaataagcgttccatacagatcgaagaacacaacctcatatctaggggtatgcgtcacgttttccatagcaggtcctttcatcggcatcgtcgccgctttaccggcggcggcgattgccactttgcagccgccgcccttgcaaaccaatgcgttatatgcgttatacacgaggttaccgcaaccgccagattgcaaacgtatgcggtggcacgatcaaataatcgccatctcccgcactgatgcacgccgcggatgcgtttgtggacgaacccatgccgcaccacacgcgagacgactccgaaaccggcgcaaccgcagtcgaggcaacgtcaatcgcgccaatatgacgtcccggattcaccgccaccaagtagtcgccgacccggaacaccagttcgtcgccttccacgctgacgatcacacgatcgccgtcaaaccattccgccgagctcttacgcaaggcgatcagtttcgtgtaatactccaccagatcgcgcatgcgccaggcacgagtccaatcaagccaattcagctcgcgcgccgaatcgtacgaatcggaattgccgtatttcgtacgcgcgaactcctcaccagacagcatgaacggaatgcccgcggaagtgagcacaatgcccgccgccatacgattcgcatccatcaccgtggccatggccccggcaatcgcggaaccggtcgaggcgagcccagcttccgaaagatcggcgtcatacaacgccttcggcacgtccacagaattctcgttgtcgccttcactaacggcgctgcccagcgatttcgcggcaaaacttgcgcaaagcttgtcccacaaggtcagatcgtcatgcgcggaaacatactggatcacttgacccgcaacaccttccggctgtttgctggcgcgccaggcgttcaccgcgtcgcgcacggaggccgcattctcatgcatacccccgttaacgtatccgggacggtccgagaagaacacatgccccttgatggcgtctcgcgtggtgtcgcaaaaatgcccgatgcgattatcaagctgcggcaatccggccttgtcggcaagcacggtgcccggcaaagccgcggtagcgctggccgaccacggttcgccatacataagaatgctcggcccacggtcggggatttcgtccaaagcggcgcgcacggcgttcatggtgtcgacgtcgatcaggcccatcaggtcgaatcggaagccgtcaagatggtattccctcgcccaatacgccacggattccaccacaaaacggcggaacatcgcacgttccgtggccatatcgcatccgcatccggagccgttcgacaacgccccgttcggcttgcggcgcaggaagtattcgggtacgatgcgctcgaaccagttgtcgggcgagaacatgtgattgtagaccacgtccataatcactttgatgccggcattatgtaacgcctgcaccatctgcttgacctcgcggatgcgcacggacccgtcatacggattcgtggagtacgatccttcaggaacgttgtaattgacgggatcgtaaccccagttgtatcggctgcaggtcgtttcgtcgacggaaccgaaatcgtagatcggcatcagctgcaccgcggtaatgccaagctttttgagatacgacaatcccgtcggaaaatcaggatgaccgtccaacgtcgttcccaggtcggtgaacgcaagatattttccacgatgggattcggggaatcctcccgcgggatcgttgctgaaatcgccgacatgcgtttcccaaacaaccgtttgcgcaatcggcacttccggcatgcgatcggcatcccaaccttcgggatcggtgcgacgcaagtcgacgaccatgcttcgacgtccgttcacgccggccgcgtgcgcccatggatcggcaacgcgatcgacggaaccgcaatcgcgttcaatcaaaaaatcgtaatataagccgtgtttattatcggcaaaatcgtaagtccaagagccatcggcctcgggacgcatcaaaaactgcccaattaaagcgtcgccgtcttcccccttggaaccgcgcgagaacaacctcaacgttattttctcggccgttggggcccaaatggcaaactgggtgccggattgcgaaaccacggcacccagcggccgttccagacaaagcgggaacggttcggcgactctcgtattcggctgttcgaaattgttttcgaggctgtttacgagcgtcattgcttcccctttttctaactgttatcagcccttgacagaacctgacatggactcctgatagaaacgctgcatcacgatgaacaggatggcgatcgggatggagatcacgaccgcggccgcggcgaagcgggcgtaccagttctggatgtattccttctgcagcatgagccacaggcccaatgccacggtgtagttggactgcgtgcggcagatcaccttggccatgacgaagtcgagccacggggtcaggaagccgatgatggcctgatagacgatcatgggcttgcagatcggaatgatgatcttgtagaacacctggaaacgggtgcagccgtcaagcagggcggcctcatccaacgaggttgggatggtgtccatgtaacccttcatcacgtagaatccagcaccggaacctgcggagtacacaagaatcagcgccacggtggtcatagcgccgcttgacaggcccaaggccttcagaatgaagtagatggcggtgacggccatgatgcctgggaacatgccgagaatcagcacgacgttcatgaaagtcttacgcacgcggaagcgcatacggctcatgcagtatgccaccgacagcacgaagatcacggagatcacgcaggtgaagcaggcgatgatgaacgtggtcatgaacatcttcgggaagtccagcacgttgcggtcggtgaacagcaccttgtagttgtccagcgtccattccttcgggaaaaaggagctggtgtacggggcggtgttcttgttaaaggactccgcgaacacccacacgatcggcacgagccagatcacggccagaatggcgaggaacaggtgggcgaagatgtcgccggtgatgcggcggatcttctggtcatgcaggaagccatggctttccactttggttgaggaatgcttgttgctcatcggaatgcctcctcattcttataggagccggaattgcggtaggtgatcagcgagaccacggccaacacaatgaaggtcatgatgcctatcacagcgccaaggttgtagtcctgcttatccacggtgagcttgtacagccaggtgatgagcagatcggtggagcctgcggaatcgcccagtggggtaggatctccgctggacagcaggtagatgacgttgaagttgttcacattgccggtgaaggtggtgatcaggtacggtgtgagcacgaagatgatgtacggcatggtgatcttggtgaagatctgccaccagtttgcgccatcgatcttcgccgcttcgtattgatcggcaggaatgttctgcagaataccggtgatctgcatgatggtgtacggaataccaacccacaagttgatgatgatgacggtgacgcgggcccaggtggcgttggtgaagaacggcagcgggccgtcaatccaaccccacgtctgcagcatgcggttcaccgcaccctgcggctggagcatagtgtgcatgaccagcagggatacgaactgcggaactgcgatggacatggagaagcaggcacgccaaaaacccttgaagtgggtggtcttacggttgatgatcatggccacgaacatgccgaagaagaagttcaggaaggtggcgaagaaggcccagaccaatgtccacaccagcacgcgtccgaacagtgctgcgttaacagtgccgccgctgttagagaagaccttggcgaagttttcaaagccgacccagtggaacagcacgaggtgcttgtggtcgtagctggtgaacgccatggagatcatgaaaatcaacggaagcacagtgaacactgcgatgcccagcgtaggcaggaacatcagcaggacatgagccttggcgtcgagcagttcgcgcacatcatccatgaagctcggagccttgccgttctcttcaagcagcacctgggacttgtatgcggaacgcaccgacataacccacaggccgacgaaggccacgcagatcacgagggacgccacaccgtagagcaggatgaccacggaacgatccggctcgacatactgccagaagccgtcaaccagtttcttgccgcccttgttttcgcccaagcttggcagcttggacagatagccaacgccattggtagccataaatacgaagaacgcgacttcaagggccagcatggcaatgcccttgacgtactgcttgcgcacgatgtttccaagaccgaatacgaccgcggaaagcttggtgaacacatcaccgtgggtcagcgcagccttgaccgtgtacggcgacgggggaacataatcagcgccctgcttccggcggcgcttcatttcccgaggggaaagagtcgttgctgtcatttcgaccgcctatctagattttgaacataaaaaagctttgcttccggacaaggggaaggagaatttgaaaaaccttgcccgggaatgcaaagctcggaggaggagtgagccattgcgccgaaagggagaaacaccatgactcgaagcgttgctcatatgcgccgggtgactggcgggattcggtaaaccagccacccgacgcttttcagttattggtatggggtttcaggatttcactcagcgatggtgcccttggcctggtcaacccagtcctgatacttggcagcagcgttgtctttggtgatttccttgttgatcagggccttgccgaaggtctcggccggggtccaccaatcgttcatgccagccaggccggactgcaggattgcggtgttggacatggtgtcagcctgagccttggcagcgatgtcgtcggtggtcaggtcggacagggaggtgtcgctcggcgggatctgacgcatctcgtagtgcagcttctgggagtcggtgttgccgaggtaggctgcgaactgagcggcggccttggtgttcttggcgttcgggttgtaagcgacagccttggtagctgcgaaggacttcatctgcttcttctcgccgttcacggtgaaggtcggcagctgagtagcggcgtagttgtcgcccagggcttccttcacgtcagctgcggaccaggtgccggagaacagcacgtcggcggagccatccttaatggcggcaaggccggaagcgccgtcgtcgttggagaagttcggattggcgaccacatcgaccagataagaagtaacatcggcgccgtccttcgggaagaccatgcctgcatcggcgtcattgcccttctcgccaaacaggctcagaccatcatagaagccgttgatgtaccaggaattctgcagggggaaggtgaccttggccttggaaaggatggtatcgaagtccttggcctcatcctcggtgatcttggacttgttgtagtacatgaaccacgtgttgtcggtgtacggcacaccgtagagcttgccatcggtaccggtgacggaatcgatttcgaggtcgccgttctgttccttcacctgcttctcggcgtcggtacccagctggccaatggccttggcgtccatcagaacgcccaactgatcggaagcgaacatatagacatcggccgcggcggacggatcagtgctgacctgcttggaagcgtcaccttcggagacgacgtcgttcttccaagtgatgttgtactctgggtgatccttagcgaagttctcttcgacctggcccagccaattggtatccttggcctggtcttcctgcggagcccacacgctcagggtgatgtcctcggtgccggaggcaccgctcttgctatcgccgtcggaggagccgccgcatgcagcgagcgggaccagcattgcaacagctgcggtaagtccgattgccttcttccaatcgatcttcattgatctttcctttcctcacataaccttgtgtatcttcagcgcaaccggtaccgagcgtctgatcaaactccgcatacgttcgcaccatcgtctttcaagcgggtgttgtccgtctttggagctaccggatgtgcatcagtgattgcaagtgtagcacaattttgccaacgtttgcaatctgacgttaagattgtttcagcagttgccggaaaacacgtttattccaaggagacacaccgacatgatttccccttcgacacacccctgtccacaatggctttccaacgcgatcttctacgagatctatccgcaatccttcgccgactccaatggcgacggcatcggagacattcccggcatcaccgcaaaactcggctacatcaccgaccttggctgcaacgcgatctggctgaacccgtgcttcgattcgcccttcaaagacgcgggctacgacgtgcgcgactacaagaaggtcgccccccgctacggcaccaacgacgatctggcggccctgttcgcagccgcccacgagcgcggcatgcatgtaatcctcgacctcgtgcccggccacaccagcgaggaacacgaatggttccgccacagcgccgaggtggatcgcaacgagtattccgaccgttacatttggacggattcctggatttccggcggtgacggcctgccgttcatcggcggggaaacgccacgcaacggcacctacattctgaacttcttcaaatgccagccggcactcaactacggtttcgcacatccccagcgcgcatggcagaagcccgcgttcggcccggaggcgatcgccacctgcgatgcgatggtagacgtgatgagattctggctttcgcttggcgcggacggcttccgcgttgacatggcagacagtctcgtcaagcaggacgacgccggcaaaccgttcacgattcgcacttggcagtacatgttttccaagattcgtccggaatttccagaagccgcgttcgtgtcggaatggggacgcccgaacgaatcgctggaagccggtttcgatatggatttctatttggattggcgctgggacggcattccgaacggctacaacatgctgttgcgcaacgtcgataatccgttgagcagggatggcgataaaagctatttcaacgtggattcgggcacgccgatcagtgattttctcgagcagtacgaaccgcagctgcgcgaggcggaacacctcggaggcaccttcaatttcatcacctgcaaccacgacaccgcgcgcgtggcaccacgcctttccgagcgtgagatcgccctggcatactgcacgctgttcgctatgccgggcgtgcctttcatatattacggagacgagatcggcatgaggtaccgcgacctgcccaccaaggagggcggctacgtgcgcaccggctcgcgcacgccgatgcaatggcagagcctcgcctcgctcaacgcgagttatgcgacgccggccatcaccggcgggaactatcttccggtcgatccctcccctgacgcgcccaacgtcgccgactcccaatccaacaaagcctcactgtggtatacggtgcgccgcatgctgcatctgagggggaattgcgaaccccttcaatcgggggcatccttccatccgatctcacgcagaaggctgttcgcattcgagcgttcgaccgatctggaacgagtgatcgtggcggtcaatccgagcacaaacagcgaacgtttgcaattaccgaatggtcactatcgaaagattttcgaaatcggcgagaccaaggtcgatttcaacactttgaccctcggtacgcaaagctttgcaattctgaaggcgaccgcataacccattccgagcagtgccgtcgtcagcttcaacgaaacatgccgtcattaccatggcggcaacgccatcgcacttcgaaaacagcggtggcaacgacggtaggacagcagtcatatccactttcaaacaccttgcaaacgataggcaaacagaaaaagcattttcactatctaacgtctataaagtagttaagaaatcgcaatacttcaacgtttacacccaataacacgcctattgaaaacgatgtcatcatatgctacagtacatagcagaacggttggcatacgcaccgaagcgcgccaatcgcgtggcaatgcagcatcatcggccagcaacggccccggaaagaaggaacctatgacggcaacccagcaaaccgaaagcgcggaacgcatcgcacgaccgcttattcagctcgccaaactcaacggcatctcaacgtcgtatatcgaccagctcggcacctacgtggaaatccgcgacgaagtgctcgtctccgtacttgcggcgctcggcgtggacgcatccagcgatgaagcgatcgcggcatcgtacgaactcaccaagcagcgcatcgcagacacccttgtggaaccgaccatcgtgaagttcatcggcaaggaagcgaccacgccgatccgcgcgaagggccacgacgtgacgctacgcctgttgcttgaggacggcacgcggtatgagggcaacctgtgcatgtacctgaccccacaggccgacggctcgcttacgctcaccctgcccgacgacattcccgccggctaccacacgctgcgcgtcaacgcgggaccactgcacggcgaggcacgactgatctgcgccccggcacgcatacccctgccgccggcgatcgtcgaaaagcagcgttggggctggatggctcaaatgtattccatccgctccgctgaatcgtggggcgtgggcgattatagcgatctgaagctgctgctcaccgacgccgccgaaaagtcgcatgctgacttcatgctcatcaacccgattcacgcgaccgcaccggtcgaaccgctcgaaccatcgccgtacctgccggaatcacgccgattcatgaacgtcacatacattcgcccgcaggatattgaggaatatgcagggcttgacgaggaggcgaaggccgaggtcgagcgtctgcacgccgaagtggctcccgacaacgacaacgccgacgaactcgacatcaactccgcatggtggcacaagcgccaggcactgcaactcgtgtttaaggtgccacgttccaccgaacgccaggccgcgttcgaagcgttcaaggaagcggccggccccgatctgcgcgcattcgccgcatggtcggtggcattccaggtgtggggcgctccgtgggagggtacatggtttgcggagacgaaccgtgattcgccggaagtggccgaactcatgcgtgatcatgccgatatggttgacttcgaatgctggctgcagtggatcgccgacgaacaggtgaccgccgcacagaccgccgcacgcgaaagcggcatggcattgggcctcatgcaagacatggccgtgggcgtgcattcgctgggcgccgacgtgtggtggaatccggaacgtttcgccgtcggcagtgtcaccgtgggctgcccgccggacttctacaaccagcagggccaggattggggtcagccgccgttcaatccgaattatctcgccaaaaccggttacggcgtgtatcgcgaaatggtgcacaacatgttctcgcacgcgggcgcagtgcgcatcgaccatgtgcttggcctgtttcgcctatggtggattccgcagggcgaaggcgcacaaggcggcgcgtacgtcacgtacgactatgaggcgatgatcgcgatcctcacgattgaagcctcccgcgtgaacggcctagtagtgggcgaagatctcggcaccgtgcccgattacgtgcgcaccgtgctcgccgaacacggcctgctcggctgcatggtggaatggttcgcccgcgtggacgactcccccaacgccggcgatccgtacgccgacccggccaactaccgcgagtatgcgctggcttccgtcaccacgcacgatctgccgccaaccgcaggctacctgcagttcgagcatgtaaagctgcgtgagcagctgcacttgcttaccggtccggtcgaggaatttcaggcttccgcaaccgcggaacgtcaggccatgcttgaccgactggtcgagagcgaactgatcacgccggaaatcgccgcggacgtcgacaatcatattcaggaaatcgtcgaagcgatgcacaaaatgctgctctgctcgccatccgtgcttctgcaggcagcgctggtggacggcgtcggcgaaacccgctcgcagaaccagccgggcacgtccagcgaatactgcaactggcgcgtgccgctggcaggccccgaccacaaggcggtacacaccgacgaagtgttcgacttgccgcgcgtgaagtcgctttccgccattatgaacggcgaaaagtaatttcccaacagtaagatttcctcacacaacaccaaaaaaatacgaaaagtcccgtcaaacacaatatttgacgggacttttctttatttccgttcgtttttctgctcgatcctccatttaatgacaacgataacaggagatttcgcaacacatagcatgccgtaaacagatttacgcatgaaaacgattgccgcactgccgagtagactggtgcgcatgaagttcctatcacccgattccggctttatgcgcggcctcagcgacgccgtcgacgcgatttggatcaacatcctcatgttggtcaccagcattccgatcatcaccatcggcgcggcactgaccgccggccacgacgcggcacgacgctcgctcgccggcgaaggcacggtcacccgcaattacttcgccgcattccgatcaaacttcgcaaaagcaaccggatattggctgattttcggcattgcaggcgccatcagcgtgtactcatggatcgtgctgcagatcacgccactgctgattccaaaattcgcgctgagcattgtatgggtgatcggattcgaatggatctgggctttgcagtcacgtttcgaaaactcgttctggcgcacactcggcaacgccttcatcttcggcgtcagcaatatcgggcacacgctcggcatggccgccatcgacgcggtctatatcgcactgctggtcggcagctggttttacatgccgcaaggcctgttcctgcttctcgttttgggctacggcaccatgattatgattcacgtgccgattttcgagcacgtgttccgcaaatatatgaagtagttttctgattcggatatgaaagagtccgagcgagatttctctcgttcggactcttttttgcgaggcggcggcgttttcccgtggctgatcgaaggatcatccttgacggctccgcaattaaggatcggtcttgcggccgggctcaatgctacctgagcgaggcctgtcggcctcgctcaggctggtgcatgggacagcgcactgcactgtcccacaagggatgatcttcgatcatcccttgactgcaccagccattacacccttgacgatgtgcttctggcagatgaggtagaagacgatgatcgggatgatggccatcaccaggcaggccatcatagcgcccatatcgacggaaccatagccgcccttaaggtactgaatagccacggaaatcgtcttgtacttacccaaatcgagcgtcaggtacggcagcaggtagtcgttccaaatccacattgcctgcagaatcgcaacagacacgatcgacggcttcatgatcggcaccacgatctggaagaaaatgcggggcacggaagcgccgtcaatcattgcggactcttccaacgactgcggaatgcccttgaccacaccggtgaagatgaacacggccaggcctgcgccgaatcccaagtacacaatgcacaagccccacggagtgttgagcttcagcatatcggcgagcttcgaaagcgtgaacatcaccatctggaacggcacgatcatgttgaacaggaacagcgtgtacagcagcttcgcagcccagttgttcacacgcacgatccaccatgcgcacatcgaagtgcacaccaagatcagaatcaccgagccgaccgtgatcagcagggtccagccgaagctggcgaagaaattcgtggtttcaatgccacgggtatagttttccaatccaacgaacgccttgccggtcgggatggagaacgcatcacgcgaaatatacgccttctgcttgaaggagttgatgatcaccagcacgatcgggaagacccatgccagcgacaccaaggaaaacagtacggtccacaatccgccatgcttgaccttttctccggaaatcatgcttccacctccttggaagtcgtcagcttattctgaatcagcgcaacaatcgcgacaagcacgaagaacagcactgccttggcctgtccaacgccttcccagccgacacggccatagaaggtacgggtgatgttcagcgccaagccttcagacatgttcgacggagcgccgttcgtcaatgcgaggttctggtcatacagcttgaatccgttggtcacgcacaggaacgagcacacggtaatcgacggcatcatcaacggaatgatgatcttgaacatggtctgcgtgccgttcgcgccatccacggaagccgcttcaagcacatcggtcggcagcgactgcatgccggcgatgtagatgatcatcatgtagccgatctgctgccagcacaccagtacgaccagaccccagaagccgtacgtcgcgctataggtcagcgagcgcgcccagtgcgcgagaatgccgttgagcagcagcatccagatgtagcccagaatgatgccgccgatcaggttcggcatgaagaacaccgaacggaaaatgttcgatcccttgatcgccttggtgagcatgtaggcgatgaagaacgcgaccacgttgatcacgatcgtggtgacgatcgtcagcaatgtggagaagcccaacgcgtgcaggaattccttgtcctgcagtgcgcgggtgtagttcttaagccctacgaactcggcgtcggtaaccgttgtgaacttgcaaaagctcaggtagacgcccatgatgaatggaacgacgaatccaataatgaatgcggcgaacgttggcagcgcaaacagcgcccaccatttccgtatcgccttgccagccatgctgatcatagcctgcctgctttctttccttctccattccgatcaccgcggcaccgcggtgcggaattcctgcaattgttggccgaatcagcggatcactgctctgttctccacctttccggtatttacactcgtcatgataaacggcatgacacgaaatgtcaaacgttgtcatttttgcatgtcttgagacgcaaatttaccaacgttgtaatgtttttgattatcaaaactcgttgcaatatcaagcattttaagcctcttctgctataatgaaaacgtttgtaatgcatgtattgcaaagatgtcgcaatacagtatgttggaacgtaagcagtcacaaggaaaaacatgaaaagcagtattcaagatgtagcgcagcttgcgcacgtatccatttcaacggtttcgcgttccttcacacgcccggatctcgtgtcgaaagccacccgagacaaggtgatgaaagccgcggacgagctgaacttctccatttcacgttccgcagccgcgctgaaaaccggtcgcgcgctacgcatcgcggtcctggtttccggacggctcaacctgtggttcagctcatccatcatcgaaggcctcaaccagatcttccacgacgagggatacgacatttccatctaccagatgtcgagcatcgaggaacgtcgtgaattcttcgacatgctgccggtgcgccgcaacgtcgacgcggtaatcgtcatttccttcgatatcgacgccaacgagatcgatcagctcaagtccgtcaatgtgccaatcatcggcatcaactcgagtctgccggaagagcgcggtttcagcgcggccgtgcgcatcgacgacaagcagggatccgagcttgccgcacgccatcttatgacgctcggccaccgtgacatcgcctacattcgcaccaaccgcgaagtgacgctccacttcagcgtgcagggacgtttcgaatcgttcatggcgtgctgccaagccaacggcgtcgaaccgcgcgtgctcgtcaccgacgaaagcaagaacaacatcagcaaagtcgtgacgcagctgctcagcctcgaccatatgccgaccgcgatcgcctgccaggaagacggcatcgcggtgccgctgctgttccagctggaacgcaacggattcaccgtgccgaacgatatttccatcatcggctacgacgacagcatttacgcgcgcgacctcggcctgaccaccgtgcgccagacgcctgtcgaaatggcgcaggaggcggcccgcatgacgctcgatctcattgaggagcgcccgcttgacgaaccgttcaaaacgttcccggcgcagctgatcgtgcgttccactacggctcgtctgcatcgctaaacggtccgaacgagcaccgttcgcatagcgtctgttttttgccgccatgttgaacttcaccacttcgtgacagcgattacaggctaccgttgccttacgctatcttgtaatcgaatctttatattcgtctttcgactactgtaaatgatagcgctttcatttctgttgtacaaattcaccaatctacagcgtgttttcgtctaaaatcaaggcttttagtatcatggaagcgttaatcattttcatcaaaggagacacatggccaaaccgaccatcgccaacgtagccgaattggcaggagtgtcgcaagccaccgtttcccgagcacttcgtggcgcgaccaacgtcacagaagagacccgcatcaaagttcagcgggcagcggatcaactcaacttcacactctcaaaaagcgcttccgccctagcatccggaaaaaccatgcgcgtcatcctcctggtctcgggcaaactcaacgagtggttcaattccggagtgctccaaggggtctacgaggagctcgcgccggtcggctatgacgtcacaccggccttcatcaccgaccgcagcgaactggaccggttcttctcccagctgccgaaaagccgcaacgcggacgccatcatcatttcctcattccagctcatgcccgccatgcgcgaccagctccaagccatagacctgccgaccgtgggcgtcaacgttcctgcggaatcgggttatttcgacgcttccatcagcatcgacaactccagtgcgatgaccatggccgtacgattgctgcgctctctggggcataccaacatcgcgttctgcagcgactacattccggccgacatggtctacaacaccagccaacgcacccaggcgttcgcggatgccgcacaggccaacgccaccgatggaatcacattcagcctgcttacggccgacgcgcacgatgcgccgctgagcaaatccgacctcgcctcgcaactgaccgcgaaactgctgtcacttccggaacgccccaccgccgtctgcgtggaaaccgaccaagtcgccatcgcactggtcaaggaactacgcaagcagcagctgaatgtgccggaagacatttcagtgctcggctttgacgacgccgaaatcgcacaggcagcggatctttccaccattcgccaggagccaatcgagctagggcgcatagccggtagaaaagtgctgcagctcctacgtaacgaacctcttgaacatccgcatgaactgcaggatcctttgctggtgttgcgcaacaccacaagccgcattgacagcggggcggcgccggcggaataaatcggcgtcataaatcgacggcagctgaataaatcgagaggcagcggaaaaacgtaaagccgccaaaacgcgaaagcggcctgtatgcatgaaccagatcatgcacacaggccgctcttttcatcgcaagccttgcagggcttcaatcagcggtgcgatctcacccctgctgatcgaatttctgcgcttgaggaacggatcccaacgattcctcgttgttgttccattcggtggcccagccgtcgacgtaggcgctcttcaccttgctccaatcgccggtgccctgcgcgtattcgataagcgccgcggcgacgtcgtcctgccactgctgatccggaacggtgaagctgcgcacctcggtcttgccgtcgacagcgtaggagcgagcgatcttggtcagcggattatccggctggaactcatcgccatcgaatgtggtgaacggtacggagaagcccatatcctgggagaggatcttcttggcctcgtcatcggtgaccatccacttgatgaagtcgagcgtggcctgcttgtctttgtcggaagcgttcttgttcaccgcccagctggcgtcatacacgcctgcgggaccgctctcctcctcgcccttgatgcccatgtaatacggcagcatgccaagatcgtcgtccgctacttcgttacccttgatctgcgtgtaggcccagacaccgttcggatagaacgccacctggccaagcgcgaattcggaagtgacatcgtcgtacgtcttcgagctgaccaggctcggatcagtcgggctggtctccagctcgagatcgaacagatccttgtagttatccaagtaggtgcccttgatggtcttggagaacgtggtgttcatgtccttgtactcgtagtacagcgggatgcgccccatatgcgcggagaaacggtatgtgtcggaggcatccagacctggcgtcgcgaacgcgccgtcgacgccgagatcgtccttgtgctcgttgatggactcggccacggccttgagcgtcttgtaatccttgatgtcgtcggcgctcttgatcaccgcgtaatccttgctggcgtaatcgttgatgatcttcttgttgtagatgatgccgtaccattcagccgcgtatggcagcgtgaacgaatcgccatcaatggtgtaggagtaggccttgccgtcatcggtgagcagtttgtacgcttcggtgtcctgcaatggctcgcaatacttctgatattttgcgaactggtcgaaaccggagatgttgaacatggtcggcgcgttggacttggccagctccgagctcatggtcgcatcgtatgtgccggacgcaccggtctgcacgtccacctgcacaccggttttttcggtatacatttcggcgagctgcttgtattggtccacgacttccgacttgttgttcatgaaatacacatggcccttgtcggaatcagcgctgctgctgccgccgccgcaagccgccaacgatacgcccatggccaacgccgcggcgaccgcgcacgttttggtgatgattccctgcttcattgcttatctccttcgttggatttgttgttattcgttggacttgctgattttcgtggtagctatttgtacgtgcgccggcattgcttccggccgccgcgttatagctggagccagacggtggtgtcctgcggcaatcggccatcctcggtgagttcacccgacgcgaggatgacatcgccttgcggtagttcggccggacgttcgccgaaattggtgacgctcgcccaaccgttggaacgactgtaggcgatgactccgccgcgttgtccatccgcgccgtcccgcacgtcagatggacgatcctcgtccagccactgcagttcggtgtcctgcggcatcaggttatgcctcaacgacagcgccttgcggtacaggttcagcatggaattcgggtcggcatcctccacgtcgacggcgaaatccttgtaccatttcggctgtggtaggtgtggatcgtgctcggcgcccgcaggagagaaaccgaaagaaccatcgtggccgaattcgtcatcgggatcatcgagcttcggtgcgtctgcggcgacccagggcagcggcacacggcagccgtcacggcctttttcgatttgctcgcgcacgctgttgaacgcggtgggatcctccagcttgttccaaggaatatccgcgacttccggcagtcccagttcctcaccctggtagatgtaggtggaaccaggcaaggcaagttccataagaatcgcggcgcgggcacgcttggcgcccaattcgcggttctcctcataggtggtaccgtcgcgcagcagccaatccttggccagctgatgatgcgacgaggctggaacctgcggcaatccataacggctggcgtgacgaggcacgtcgtggttgctcatcacccaagtcgcggaggagccggaacgttccgcgctttccaagccttcctcgatggccaggtgcatgtcgtcgcgaatccagtccttcttggcgaactcgaagttgaacacctgtccgagctcttcggtcgaagcatacagatactggcggtccggattgacccaggcttcggccacagcgaatgccggcggattgtactcgttgaacaccttgcgccactcgcggtagatgtcatgcacctcatcacggtcatacaacgggtgcgacccgtccgaaggaagcacatgctcgcagaccttgtagctttcgaggtcgtcgcggtcaagatccttggcgaggccgtgcgccacgtccacgcggaagccgtccgcaccatggtcgagccagaaacgcagcgtcttgatgaagtcggcgcgcacctcggggttcttccagttccagtccggctgctccttggtgaacatgtgcagataccactggccgtcaggaacgcgcgtccacgccggaccgccgaagcttgcgatccaatcagtcggcggctggtcgccgttcgggcccttgccgtcgcggaagatgtagcggtcgcgttccggggaacctggggcggccgcgagggcggccttgaaccattcgtgcaggttggagctgtggttcggcacgatgtcgaccacgaccttgatgccgtgctcgtgggcggccttggcgagctcgtcgaaatcgtccatggtgccgagcttcgggtcgacgttgcggtagtcgtccacgtcgtagccgccgtcggcaagctgggacgggtagaacgggctcagccagatggcgtccacgccgagttcggcgaggtagtcgatcttctcggtgacgcctgcgatgctgcccaggcccgaaccgcgggagtccttgaaggaacgcgggtacacctgatacaccacggcctgcttccaccacaacgccggatcggtagtatcaatttcttgttgcatcatatgttttcactttcgttcgcatcgttgcaaaatgatagcggttacatttcttcaaattacagataagaacatttttaaattaacatcttttctgcttgatattaacaatgatagcgctttcattactgcaacgcaatccctccgacgcacggcgtgtcctacagccgtacgtcgccgcataaaaaaacgaactgcaatcaggagaggaaaggaagacttccgattgcagctcgttgcttgttcagttattcagttatgcagttattcgattattcgatcgatcgcgcgctgatggtatttccggcggtccgcgctacgcgacgcgcggaccgattcgtcatgcgcgattttgattagttttccgatgcgatcagtgagccgcgtcgtattcggtcttccaaccgtccacaaatgcggtcttgacggcattccagtcgccggtgccctgcgcatactcgaggagggcggaaccgagctggttcttccactcttcggacggcatcatggtgaagttccaggagactgcggtcttgccggagttctgatcttcaacagcggcctgcaccagcggattgtcggacttgacatcgctgaaggacttgaacggagtagtgaagcccatggcgctggacagggactcgatgccggtcttgctggtgacgacccacttcaggaagtccttggtggcctgcttatcggcgtcggaagccttggagttaatgcaccagtagttctcggagccagtggccagaccctggttctcctcgcccttgacgcccgtgtagatcgggagcatgccgatggactcggccttcatgccgttcttctgcagatcggtccatgcccaagtgccgttctgatagaacacggcctcgccgagggagaactcggaggtggcgtcatcaccggtcttggagctcagctgggtcggctcggtggtggaatcctgcaggtacaggtcgaagatgttcttatactccggcagataggtacccttgacggtctccggctgcttggtgacgttatcatccttgaactcgtagtacagcggcaggttggccagatgggtcttaaaacgccaatcggagctggaatcgaaaccagcggaagtgaatgcgcccttgactccgagctggtccttcttggcctggatgtcatcagccacggccttcagggtatcgaaattgtcgatatccttgacgtccttgatcttggcgccatcggtggcgatgtacttggccagcagatccttgttgtaaatcagaccataggtttccatagcgtacggaacgccaacgaccttgctcccatccttgagggcgacgtccttgttgatgagctgcttgtacggctcggtgtccgtcatgtcatcagtgtaggacttccagttctgatagccgaccggaccattgacctggaacagggtcggggcttcggacttggcgatctcggacttcagggtctgctcgtaggtgccggaagcagcggtctggaccttgacctcgacaccggtttccttggtgtaatccttggccagcttctgccattcgtcgttggattccggcttgaagttcaggtaatagaccttgcccttgccgtcgtcggagctggagctcgatccgcaagcacccaacgtgcctacggacatcgccgcgatggcgaccattccaactgctgccttgatagtacgattcatcatcgaacctttctcttccattcctgtttcccagcaccccgctggtcaacatcctgtgaaatcgcttcctcacgattcctgacatgcactattgtgccgcatttctcccatttttgcaaacgtaagcaagaaaaaccatttttaggatgattttacgatcgcaggtttttctcaaaatactttattttcaacggttttcatcacactgtctttatgaaaccgtttgcgacacaccctccatatcacacggcaacaatcgcagtgaatcgcgaacctgacgccgtacggcaacaaaaaaacgtcggcggtttgtaaacgatgtcaaactaccgacgttcagcccagcgcaacgcacctagcaattccaatgctcgataacgttgtctcccttatattggctcagcacgcaataatgcgcggtgtcgaggcgcagcaaacgcgcgaaatgcggatcgacgtccagccactgcgaggtgaggatgcgcaacacatgcgcgtgcgccaccaacagcacgtcatgaccggcattgagcagcggcatcaccgcgtcgatcgcatcgcgggtgcgcgcggcggcctcctcaaccgtctcgccagggccattgtgcaccggaacctgctcgccgcttggcaacgtctcaacccagtcgccctccaacgattcgggaagggaactcggaccgtcgcgccatacatcccactggaagccgccagcctcgctcacctcctggcgtgtacgcccttcggcacggccgtaatcccattccgcaatctcgtcaagcactttgaaatcgccataaccagccagttgcgcggtctgctgggcgcgacgcagggggcttgcgaacatgcagccttggtcgaaaccattggggaacgcctcacgaagacgctcgcccgccgcacgagcctgctcgcaaccggtatcggtcaacggaatattggttcggccggtatgctggcccgattcgctccacacagtctggccatggcgcagcagtaccaggcggccgggcgcgattgaagaagcatccttgcttccgacttgagtatctgtcatactcctactctagccgacgaaaagcgtttcaccagcaatcttccaccacgtgtcttaagcgcttcgcaacgcacgcatgcgccggcgaaatccaaccgaaatccgacggcacggtctacactggaaatcatgagtgaaatgcctgacccggaatccagcgcagaccgcatcgtagcgtcgctgcataacgtcgacgagaaagtgaataccctgcgcgaacagcgaatcaacgatcccgacgatctttgcgacaagatgttcaaggtggccgcccccacgctggccggactcgtgttcggcaaactgttcgaactggcatggcgcaagtcggtcggccgcaaagccgtgttgccggacggcaccaccgacaaacgcaaggaactggcgctgaatctcgtgttcggcgtagcttccgcaggactcggcgcgctggtatcgcaactatccgaccgcggatcgcaggcgctggtcgatcgccgccactcccgtcaatcgcgccgaatccgctgaaaccgtggaatccgctagatttgccgataagcgcgaatttcgccaaatccgcaaacaatcccactccaacttccatatttcgaagcgtgcgattcaaatctgcaattgaagctgcggttggaaccgcacgaaactgcacggaactgcgattggaaggaatgcgcttgcgggcgaaaatgcttgcgcaattacgcggatgggataaaaatagtcaacatgagtaatattctgcataatgcaactgtcgacactctgctggagcgtcgttccatccgcaaattcaagccgaagccgctgagcgacgatatcgtcgaaactctcgaaaccgtggcccagcatgccgcaagcagccaattcctgcacgactggtcggcaatccgcatcaccgatccggccgcaaagaagcgtcttgccgaaatcggcgggcagccatatatcgcgaccgcgccgctgctgtacgtgtttgtgcttgatgagcatcgcaatgcggccatcgcagcttccaagggcattgagaccgcttccgacgagtttacgttgaatggcagctatcgttacactcaggcacagaatgacgcagttttggcgcttcatgcgatggagacggccgcttattcgctcggccttggctgtgtgattctcggctcgctgcttaacgatgttccggctttgattgatctgctgaatcttccggaatacacgtaccctgtgctcggacttgcgattggcaagcccgatcaggatcccgcactcaagccgcgtatgccgcgctccatgcagttctttgagaacgctccatgcagttctttgagaatgagtatccgtcgaacaatgagacgttgcttgccggtttgcaggattttgacgaggaagtgcatcggtattacgatttgcgcaataccgagcgcccagttgatccgttcagcgatcagatcgcgtcgaatgcggtcgattccggtgtgaccagcaaggccgtggctccaaacgccaagcgccaaggcttccgcctcgagcgctaacggaactacttacgacgtggtttgtagccttttttgcgggaatgcggtttaatctgctgattgaggggcacgtacgtgtagctggattgtggatcgcgatgcgtgagatgccaggtcccgcagaatccgcaccgatatacccatagctcggtaccgcgttcacgccaaccctggtcggcggcccgccgggccgtcgcttcgtcgtgatacatgattttgttcgatccgacacagcgtttgggcacgaaataatgcatggttcctcagtctatcccaccatcggataagagcaggaagctccctcgaaattcctgggatccctcagcgtcccgaacctcccggcgaccggaacgatcctcccgcccacgggccttccggcgtccgtttccctccaccgaatggaggaagacacccgtgcgcgggaataagaaaaggggttcccggagcgtcgcgcccggggatcccccggaaaccggaagacaaacaaaaaaagggttcccggagcgtcacgctcgacgggaaccccgacgttgaatgcggcggcgtgctactctcccacaccctctcgagtgcagtaccatcgccgcgaccaggccttagcttccgggttcggaaagggaccgggcgtctcacctgggccatgaccaccgcaaaaccaatacaacagccaaccggaagaaccggcggccggcaacggaaccaaccacgattccgatcgtggcggtccgggaaccggacaacggacgcgaacaaaacgcttcgatccttcgtctcgtgaccacaagaaacagcattccttgccatccaacgagaaaccaccacaggacgagacccaacccaccacaaaggaaagggtcggaaaatgtgccgcgatcgcccgttagtaccggtcggctccacccctcacagggcttccacctccggcctatcaaacacgtgttccacatgcgggctacaggcaccaaagtgccaaggaatcctaatcttggagcaggcttcccgcttagatgctttcagcggttatccctcccgaacgtagccaaccggccatgccgctggcgcgacaaccggcataccagaggtccgtccacccaggtcctctcgtactatgggcaggcctcctcaggattccaacgagcgcagaggatagagaccaaactgtctcacgacgttctgaacccagctcgcgtgccgctttaatcggcgaacagccgaacccttgggacctgctccagccccaggatgcgacgagccgacatcgaggtgccaaaccatcccgtcgatatggactcttgggaatgatcagcctgttatccccggggtaccttttatccgttgagcgatgccgcgcccgtgcgccggcaccggatcactatctccgactttcgtccctgcccgaaccgtcgttctcgcagtcaagcccgcttgtgcgattacactcgaaacccgattgccaaccgggctgagcggacctttgagcgcctccgttactctttgggaggcaaccgccccagttaaactacccgccaggcactgtccctgaccaggatcactggccgaggttagacgtcaaacgagaacagagcggtatttcaccttgcggctccacacgggctggcgcccatgcttcgaagcctcccgcctatgctacacaatccgcgcctaacgccaataccaaggtatagtaaaggtcccggggtcttttcgtccttctgcgcttaacgagcatctttactcgtactgcaatttcgccgagctcctggtcgagacagtggggaagtcgttacgccattcgtgcaggtcggaacttacccgacaaggaatttcgctaccttaggatggttatagttaccaccgccgtttaccggggcttgaattcaccgcttcacccgaaaaggggctgacggatcctcttaaccttccggcaccgggcaggcgtcagtgcatatacagcggcttgcgccttcgcatgcacctgtgtttttggtaaacagtcgctaccccctggtctgtgccaccccccaacgctccgagggcaagcctcttcacgcccgggggtctcccttataccgaaggcacgggagtgatttgccgagttccttgaccaggattcgctcgatcgccttggtattctctacctgaccaccagtgtcggtttggggtacgggcggcaacgcccctcgcgccgaggcttttctcgacggcctggaccaccggatatcgcgcccaaaagacgcccatcatcacacctcaccctacatgccccacggatttgcctatgggacgggctgcgtgcttgaccacggaaaaccacctccgcggccggctcccattccgtgtcacccctgtgcgctaacctaccaggactacgctcccaacaaccgcggaccccgaaccccgaagggaacgacgccacgcgaccggaggttagtactcatccgttcggctcttacggtacgccgccggtacgggaatatccacccgttcatccattcgactacgcctgtcggcctcgccttaggacccgactcacccggggacgacgaacgtggccccggaacccttggtcatccagcggacgggatcctcacccgtctctcgctactcatgtctgcattctcactcccgcgcggtccacggcacgtttccacggccgcttcgccccacgcgggacgctctcctacccagcagccgcaaaggctgctgccgcgtcttcggtggtgtgcttgagccccgctacattgtcggcgcggaaccactagaccagtgagctgttacgcactctttcaaggatggctgcttctgagccaacctcctggctgtctatgcgactccacatcctttcccacttagcacacgcttcgggaccttagacgacgatctgggctgtctccctctcgacgacggagcttatcccccgccgactcactgccggaatacacatccacggtattcggagtttggctgctattggtacccgacacgggcccgcaagcatccagtagctctacccccgcgatgcaatcaaccgacgctgcacctaaatgcatttcggagagaaccagctatcacggaatttgattggcctttcacccctagccccaggtcatccccccggttttcaacccaggtgggttcggtcctccacgcggtcttacccgcgcttcaacctgcccagggctagatcatcccgcttcgggtccagggcgcgcgactcaaaacgccttttgagactcgccttcgctacggctcccccaccacgggttagcctcgccacgcaccactgactcgcagactcatttttcgataggcacgccgtcaccccaccaacggaggctccgacggattgtaggcgcacggtttcaggaactctttcactcccctcccggggtgcttttcacctttccctcacggtactggtacgctatcggtcagacaggtatgcttagacttaccccacggtcggggccgattcacacgggattccacgaggcccgcgctacttgggacgcatgatcggaagacggcaagcttccaggtacggggctggcaccctctgcggccaggccttcaagcctgttcccctggcaagccgttttatgactcccgcccggtccgtcggaaccgggacacacgctccctcaacaccacggacgcaacccccgacgggtatcacgcgcccatggtttggtctgatccgctttcgctcgccactactcacggagtatcccttcctgcaggtactgagatgtttcacttccctgcgtacccccggaacaacaacgttccgtgccggcccatgacggccggcgggttgccccattcggaaatcctcggatcgaagccatgttggaggctccccgaggcttatcgcatcctcaaacgtccttcatcggtactgtctgccaaggcatccaccatacgcccttcagggcggcacacgccccgaaaaacccaatgatagcttcaaacgccagacgacaaatcatcacactgtaaaaaatgatcacaaaacgatcgatctcgaaaccagactcatccaaaaaagaagagcctggcgaaatcgcgataaagcaaacgatgaaacagaattcatcgcattgctcgcgtccactatccagttctcaaaccaccacgcgccccgaccggacccggcccgcggcccgcaaggccgacggcgtcccgccaggggcatccggaaaaccgcacgcgaccaaacgtcgcgggtggcggtccgggaacccaaaagcatatccgcaccactccccgccggccccaagggaaccagcgaagcccatgatctcttccacaccagcacgcccacgccagaccggagacgatccccggcgcatgggccacacgacggacgacaaaccatcgtcctgaaaaactccgtagaaaggaggtgatccagccgcaccttccggtacggctaccttgttacgacttagtcccaatcacgagtctcaccttagacggctccatccacaaaaggttaggccaccggcttcgggtgctacccactttcatgacttgacgggcggtgtgtacaaggcccgggaacgcattcaccgcggcgttgctgatccgcgattactagcgactccgccttcatggagtcgggttgcagactccaatccgaactgagaccggttttcagggatccgctccacgtcgccgtgtcgcatcccgttgtaccggccattgtagcatgcgtgaagccctggacgtaaggggcatgatgatctgacgtcatccccaccttcctccgagttgaccccggcggtcccccgtgagttcccaccatgacgtgctggcaacacagggcgagggttgcgctcgttgcgggacttaacccaacatctcacgacacgagctgacgacgaccatgcaccacctgtgaacccgccccgaagggaagccccatctctggagcggtcgggaacatgtcaagcccaggtaaggttcttcgcgttgcatcgaattaatccgcatgctccgccgcttgtgcgggcccccgtcaatttctttgagttttagccttgcggccgtactccccaggcgggatgcttaacgcgttagctccgacacggaacccgtggaacgggccccacatccagcatccaccgtttacggcgtggactaccagggtatctaatcctgttcgctccccacgctttcgctcctcagcgtcagtaacggcccagagacctgccttcgccattggtgttcttcccgatatctacacattccaccgttacaccgggaattccagtctcccctaccgcactccagcccgcccgtacccggcgcagatccaccgttaagcgatggactttcacaccggacgcgacgaaccgcctacgagccctttacgcccaataattccggataacgcttgcaccctacgtattaccgcggctgctggcacgtagttagccggtgcttattcgaaaggtacactcacccgaaggcttgctcccgatcaaaagcggtttacaacccgaaggccgtcatcccgcacgcggcgtcgctgcatcaggcttgcgcccattgtgcaatattccccactgctgcctcccgtaggagtctgggccgtatctcagtcccaatgtggccggtcgccctctcaggccggctacccgtcgtaggctcggtgggccgttaccccgccgactacctgataggacgcgaccccatcccataccgatgaaatctttcccgacaccccatgcgaggagtcggagcatccggcattaccacccgtttccaggagctattccggtgtatggggcaggtcggtcacgcattactcacccgttcgccactctcaccaccaagcaaagcctgatggatcccgttcgacttgcatgtgttaagcacgccgccagcgttcatcctgagccagaatcgaaccctccacaaaaaaattcatgaagagaaccaacatgtgactctcaaaaataaagaaaccgacatccgtttataaggaaaacggactgtccgcaaaaaccccgtcccgtttgaccggcctcccggcacccacgccgaacacgcgggccgtaagacggactggcaatcattgactataaagaagtagtacaaatacgcttttgagttctcaaaccaccaccactcacccacctcagggaaccccagccggggaaccactcgccgagcggcagcgaagagtcaatttacacgaaccccggcgatcacgcaaatcgacccttccaaagataccctaaaaccgttgcaaataaacacatccctcggcgtgtcccgattccgtccatctgaatcgtctttctccttttccacagaaaccagctcatccttccggaaaacatgttcgtcgtatgagtcgccttatcaggaattgacggaacgatacgttgaggggattctgttatcctgtggggcgcagcggagcaaaatggcctgccaagacgggatggtccctttcctgaacaggcttttgactcaaatagaagacggatcgaatattccgcagtgataccgtgaagggagggaacggcatggaggcgcagcctatgaggctacaggacctgagactcaaagaaggaatgtctctagaacagctggccgagctctccggcgtggatcatgatcgtctcgtcatgttcgaaaacaatccggaaaccatacgcaatatgcatttggacaccgctcgccaaattgccaaagcattgcactgcaacgtgttggagctccatcccgacgaaggttggagaggcggaatccactgcgctgaatccgggctaagagacattcgtcggactcgcggctatacgcaaaacgagttgtcagagatgacagggattccccagccgaacatctcttggtttgagacaggctatcgctcgacctcaggcatgcggctggatacagccaggcgtctgtcggaagcgcttcgatgcgatccgacagatttcctaaaagaagcgtatagccgatatgaaaataaatgttgtatctgatttagataaaacacttaaatttcatcggacgccatacttcaacaaacgaatgcatcccgcgcacctcccatctcaccaaaaagattaggcaagaaagaagcccatcaatcattgacttcacaaacctttcccttccagaaagctggataacgtccgagattttgcgcactttcggacgttatctggcgcggaggacgcatttgcgcagttcggaagcgatgagcacgatcatggcaaggccgaggcattcgacccatgcgccgacgctgagcggtaccgtaccgaaagcggtgttgaggaacggaatgtaaatcaccgccagctgcaataccatgctcagcgcgatcgcgccccatagccacttgttggagaacagtccgacgaacgctgactgcaagtgcgagcgcgaggcaagcgcgttcagcatttgcgcgaacacgagaatcgtgaagcccatggtgcgtgcttccgtcatttgtgcgtcgtgaccgatcgcatcgacggaacggtcggtgaacagaccgccgtccaagtgcatgtccatgccgatcagggtgacggccgccataatcacaccgatgaaaatgatgtcgccccacatttcggcgtcaatcacgcgatcggtgagtttgcgcggcttgcgcgccatcacatcgtcggtggacgggtcgacgcccatggcgagcgcgggtgccgcgtcggtgagcaggttgatccacagcagctgcgtggcaagcagcggcacggtcacgccttggctgccgggctgggtgatgccgaggaatccggcgagcatcaccccgccgaacacggtgaacacttcgcccacattggagctcagcaggtagcgcaggaacttgcggatgttgtcgaaaatgccgcgtccttcacgcacggctgcgacgatggtgctgaagttgtcgtcggcgaggatcattttcgcgctctgcttggtcacttcagtgccggtaatgcccatggcgacgccaatatcggcggttttgactgcgggagcgtcgttcacgccgtcaccggtcatggccacgatattgccttgccgttgcaaggattcaacgatcttcaacttgtgttccggcgcgactcgcgcatagacggacacttcactggtcaccttgtcgaatgccgcttcgtcggatagttcgtcaagctggctgccggtcatggccgtgccgcccttgtcgataatacccagatcggtggcgatgcgcgccgcggtcagcgggtgatcgccggtaatcattaccgtacgaatgccggcgcgatgcgcttcggcaaccgaatcacgcacttccgtacgcggcggatcgatgatgccaaccatgccgacccaaatcaaatcgttctcaagcacatcgctttgttccgcaatatcggcaacatgacctgcggaattcagcatgattcccggcacttgcgcaagagaagcggtaccgagcggacgataagcctgacccaacgtgcggtatgcgtcggaggaaagctgttcgacagtcgcaagaatctgctgacgatcaccttccgtaagtggacgtaccgcaccgccgaccgcaatcctgctgcaatatccaagaagcacatcgggggcacccttggagaagacggtcagacggccggcgtcagcgttgtcttgcgccacgatggacatgcgcttacgttcggaagtaaacgggatttcgccaacgcgctcgtagttggcgtacttgcgatccgccttcacttttcgtgctgcgacgatgagtgagacttcggtcgggtcgccgaccgcctcccacgttacgttttccgcatttccggcagaagcagcagattcgcgcagttcgccgtcgttcgccaacgcgcccacggcaagggtcgcaacggcttccgattcgatgatcccgcgtatttgcgcatgttccatggtctgtggatcgaccaccatgcggccttccggcgcatagccggtgccagtaagctgcacttcgccgctcggagtgaccacgcgctccacggtcatctcattgcgggtgagcgtgccggtcttatcggagcagatcaccgacgcggatccgagcgtttccaccgaatgcagcttcttgacgatcgcattgtgcatggccatgcgctgcacgccgagcgcgagcaccaccgtaagaattgcagccaaaccttccggcacggccgcgaccgccagcgagacggccaacagtagcgaatcgatcacatcgtgaacgtcttggaagccttcggtaagcgcgagcgcgaccagcaccacgaccgcgatgatgcataccgcgctgccgaggattttggaaacgtagttcatttccttttgcagcggggtttcgtcgtcttccgtggcttgcagcagatcggcgattttaccgacctgcgtgcccatgccggtgctggttacgatggcgcggccggtgccttgcgttacggacgtgccgttgaacaccatgttggcgcggtcgccgagggccttcgcctgtgcgagggtgtcggtctttttgccgacgggcacgctttcgccggtgaggctggcttccgcgattcgtaggctggcggcggcgaagaggcgtccgtccgcggaaacggagtcgccttcgccgagcacgatgatgtcgccgggcaccacgtcaaccgtgttgatgcgttcgatattaccgtcgcgcagcacgttggtttgcggcgcggtcatgctggagagcgcttcgacggcggcttccgccttcgattcctggatgtagccgagcaccgcgttgacgatgaggatcagcacgatgacgatggcgtcgaacggcaatgcttcgccgccttccgcacccggtacggcgttggctcgttcaatgaaccatgcgacgagcgaaatgccggttgcggccagcaacaggtagacgagggggtctttgaattgttcgaggaatttcttccatttcggcaccggtggtgcggacgcgagttcgttcggtccgtacttgtcgagtcgacgcttggcttccgcttgactcaggccggtattcaaatcgacaccaagcgattgcgctacggtttgcgcatcggcgagcgacggatcgacttgcgtttgcgtcgcggtttttgctgcttgttcgaaatttcccgaactggtatcgcggaattgggtggattgatcttccttgcgatcaaccatgatgatctccttgggagcgccgcggagtagtcagcactcccctgccgttgcgatagtgcgaaatagcggaaaattgcgattttcgcaaccactcgccgaactgggcaatgctgcgcggttgtgggcaccgggcgtacgccatcggtgcattcctgccattattacacaccgtgcccattttgcaagactgcaacgcaccgtcttttgtcaagatttcacaaaatcgtgaaacataatctgcaatcttatttcgaccgcgcattcgattacacggcaacaccgacggcaatgtcgctaccatctttggcggaagtgtgatatgttatcggatgttagtaaacaaaattacttacgctatgattcgtagcgtacattggcaacgtcgcaatggataggggtagttatcatggcagctcaagaagccgcgcaatcacagcaaacgcaaggggttccggaatcgcgcatcctgcaggcgcggcaggcgaacgcaagctggctcaccgatccgaccgtattcgcggtgaatcgcaagcccgcgcactccaatcatcggtatttcctgggcgaagccaccgaaccaaagcagaatctcgacggcgaatggaaagtaaacgtcactcaggcagccaacgtcgacgtggaaaacgcgccgttcgccgcagctgacttcaacgatgccggtttcggcgcgatcaacgtgcccgaacacctgcagatggccggctatttgaagaacaaatatgtgaatgtgcagtatccatgggatggccatgagaatccgcaggagccgaacgttcccgaaaacaatcatgtggcgatctaccgccgttccttcacgctcgaccgtccgctcgccgcaacgctggaaaatggcggcaccgtcagcgtcaccttccacggcatggccactgcgatctacgtgtggcttaacggcaccttcgtcggctatggcgaggacggtttcacgccgaacgaattcgacatcaccgaagcgttgaacgttgacggcaccaacgttcttaccgtcgcctgctatgaatacgcgagcgcctcttggctggaagatcaggatttctggcgtttgcacggcctgttccgttctgtcgaactcgccgcacagcctcgcgtgcatgtcgaaaccgtgcagatcgaagccgactacaatccctccacggccgccggaacgctgaatgcaaccctgcagttgcgcaatgcaaacgacgcggccaccgtcaaggcgaaactgcgcgacacaagaggcactgtggtgtgggaatccacgcagtgcgccaacgagacgatcatcctcaattccggcgcgctgaagaacattgcgccgtggagcgccgaagagccaaccctgtatgagctgacggtgcttgtcgtcggccatgacggcccgctggtcgaaaaaatcgtgcagcgtatcggcttccgcacattccgtatcgaagacggcatcatgaagctcaacggcaagcgcgtggtcttcaagggcgccgaccgccacgaattcgacgcgaagcgcggccgcgccatcaccaggcaagacatgatcgacgacatcacgttctgcaagaggcacaacatcaacgccatccgcacctcgcactaccccaaccaggaatactggtacgacctgtgcgaccagtacggcatttatttgatcgacgaaaccaatcttgaaacgcacggcagctggtgcctgccgggagacgtggtcaccgaggattccgccgttccgggcagcaagccgcagtgggaaggcgcgtgcgtggaccgcatcaacagcatgatgcgccgcgactacaaccatccgagcgtgctcatctggtcgctcggcaacgagtcgttcgccggcgaagtgttccgcgcgatgcacgcccacgcacacgcgatcgacccgaaccgtccggtgcattacgagggttccgtgcatgatcgcgcgttcgacgacgtgaccgacatcgaaagccgcatgtacgcgcatgccgacgaaatcgaggaatatctcaagtccgatccgaagaagccgtatatttcctgcgaatacatgcacgccatgggcaattccgtcggcaacatggacgaatacacggctttggaacgctatccgcagtatcagggcggatttatttgggatttcatcgaccaggcgattctcgacagcaacggtcgcatgtgctacggcggtgatttcggcgaccgtccgagcgactacgaattctccggcgacggcctgctattcgccgaccgcacgccgtctccgaaggcgcaggacgtcaagcagctgtacgcgaacgtgcatatgaccgtcgatgcttccggcattacgatcaccaacgacaatctgtttgtttcgacggctgattccacgtttgtgttgcgtattttggctgatggcaagcccgtttggtcttcttcgcgccgcttcgacgttgccgcaggtacaagcgagcatgttgagatcgattggccgatcgacgattaccgcgcaggtgcgcaggagctggttttggaggtttcccagcagttgtctgccgcttgcgattgggctccggccggttatgagctttcgttcggccagtgcgtggttacgggtagcaagattgccgatactgttacggccgcttccgccgcttccgatggagcgatcaccttgggacgttggaatatcggcgcacgtggcgcaggtcgcgaagccctgttctccctcgcgcagggcggcatggtgtcgtacacgctcggcgaacgcgaattcgtgctgaggaagccgctgattaccaccttccgtgcgctgaccgacaatgatcgcggcgcaggccacgcgttcgagcgtgcgcaatgggcagttgccggaaagtatgcgcgttgcgttgatacgaaggttgagccgattggcgaaaccgcgatttccgtcacgtacacgtatgagcttgcgattgcgcaacgcacgaaggtcaccattcgttacgttgccgatgtgctcggtcacgtcgacctgcatgttgcgtatccgggtgaaaaggacggcagtctgccgacaattccggcattcggtattgaatggacgctgccggtcgagtattcgaatctgcgattctacggtgtgggcccggaggaaacgtacgccgaccgcaagcatgcgaagctgggcatttgggatacgaacgccttccgcgatcgcgcgccgtatctgctgccgcaggaaaccggcaaccatgaggacgtgcgttgggctgagattacggacgattccggtcatggcttgcgcgtgagccagactgcgaatactgaaaccggcgttacgaagccgtttgcgatgagcttgctgccgtattcaagcaccatgcttgaagaggcgctgcatcaggacgagctgccggagccgaagcacatgttcctgcgcgtgctcgccgctcagatgggtgtcggcggcgacgattcctggatgagcccggtgcacgagcagtatcagctgcccgccgaccagccgctcaacctcgacgtagccctcgacctgttctagtttcaaggattcagtcgattcctacgtgcgaaatgcctcccgattcttgatttcaaggatcgggaggcattcgttttgccgcaagttgactttcgacctcacgattcgcagttctgtctcacgatttcgcaagatcgtgcgacaattcggaaaaaacatgcgatcagaccatcaaaatggacgatgagggggattttgttgatggcttaaattagacagattgcctagaatgagggcagaacttccgaaacgttcgagcgcaggcgggcaaattcgcgcgcgtccgagcgtcacgaagcacgctcttccaggaaaggggccatcatgagcgacgcaatgaacaacccgtatgcgaacaatccgaatcaaaatggcggcaacggacagcagccgcaaggccatccggaatacggggcatacgcaccaaaccagcaatcgcaatcccagcagcagggcggcaatcccaacaattcgggcaatccgtatcaaagcgagcctcagaccccatgctacttcgacggtcccaacgccaacccgaatcccaaccagaacggcttcttctacgcgagctacaccaccggtcagccgtacggccaaccatacggacagcagaacagccaatccgacgctgacaacggcaccaacaattggcagccgatcagcccattcaagctcgtggaggaatggctcccgaagaaggcaaagaacgcgatccgcggcacgtatgcggtactcggcatcgccgccgtcattctcggcctggcactgctgatctggccgggtgccacactgaaggtcgccgcaatcgcgcttggtgcatacttcgtggtttccggtgtggtccgcattgtgaccgcaattgtggaactcgggcttccgggaggatggcgcgtgcttgacattctgatcggcctgatgctgtctgtcggcggtgtggtcatgctgaaaaacgcggcgctttccggagccacactcgccgtgctcatcaccatggtggtcggtctcggctggatgctggaaggcgtgatggcgctcgtggaatcgtggcgcatgccaagctccgcatgggccgtaatctacgcactgctgtcgatcgtcgccggcttcatcgtgctgttctcccccgtcagctccacgacctggctgatcctgttcggcggatgcgcgcttgtggcgatcggcatcgtcgcgatcgtacgtgcgttcaccttcggcaagtccaagcgcaagtaattttttgcggcgcgggccgtaaagtctgattatctctgttttcccaggggcaccaagcaacagctcggtgccctttccatagcgaaatcgctttttataccaagattcaaagtcgcacaaccatgaatcttggtattaatactggtatataattgggtatgaaattcggttttaagaaaggtttatcatggcaagcgcacttgacatactcgatgaccttgctccaatcagcgagctcagcaatggtcgtacttccgcattgttgcagcgggccgaccacgatccagtcattctgatcaaacgaaacaagccgtcctacgttctcatgaatatcgaaaactatcgcgctctcatggaacgaatcgaagacaacgaagacttgcttcttgccgaaaaaagactcgacaacagtactggcacaactatcagcaacgaagaggtcatgctcgatctcggcatttccccaagcgacctcgccgaggcacctgagccggaactcgcatgaactggcaagttgaatggcttgacgaagccaagaaagacatgcgcaaactcggcaaagccgagcaaatccaagtactcaagggaatcgagaaagttcgcacaaacccactgcccacctcgcaaggcgggtatggcaaaccgttacgcaatgccgaacgaacgaaactttccaggctttgcaaaatcaaattcagggatatcggcattcgcgttgtttacaaaccgttactgcgaaatggaatcatgaccatcatcgtcgttggcattcgttccgatagtgacgcttacatcaaagccaacaagagacgcaaagaatatggactataagatgcgtccgccaattttcagcgaacgttactttttcttcaagattagccgatgattttacaaaagaagtgacgatcgtcgcatgacattgtcgacttgcccgacgtaagatgaaggcacaacagaagaacgaagaaaagaaaatagacaacaaacacagacttacggcagcggccagaggaatggacaagaaaacagatacgcgccgccaagccgaacgaaaggaaacatcatgaagaacaacactttcaaccaggtcatcaacgccaacctcgcttccatcgatccgggcttcggccagttcgcactcgccaaggcttcctccgacctcttcaagaaggtcctcaacaagtaagaccgcttcctagacgggaggcaaggcgcaggcgccacagcacctcgcccctcttctttccaatccttaaatcacatagcgggaggccgcggttccaaacggaatcgcggcctcccgcttttcacgtacgccggctacccctcctcaacagcgagattgcgggcggcggcgcgttcgcgtgggccgcgcgtcacgtagaagccgattgccacgatgacgaacatcaccgtgcagcagatccacagcacacggctgccgaacgcgttgagaatccagcctccgaccaacggcgagaacgcgttcgacagcgaccacaccaggttgtataacccttggtaggtgccgcgcacatcctttggcgcgatgttcgccaccgttgtggcggcaatcgggaacgtgcccagctcgccaagcgtccacagcacggtcgcgattgcgaacgccacccacgaattcgcgccgatctggaacgcgtatccgaccgccgtgatggacatgccgagcaccagcactcgggtgttgctcatccgctggaacagaccgatcgcgggaatctgcagcagacacagcaggccgccgttgatggtcagcagactggaatattcatccgtgccaaggccgatctgcgtcatggaaatcggcaggccgctgacgatctggtaatacgccagcgtgtacaggaacatcagcaccaccatcgacatcagcgcgccgtcggcgcatgcgcgacgatagctgcgccatacggagaaccgctgcggccgctgcgattcgccggtttgtttcacagcatgttccacggcatttcccgcagctgattccgcggcttgcgacgcccgcgccggcgcgacctcgccccgcgggcgcttgcccagcccgacttccttgaagaacacgatcatcaagatcgtggcgaacaccagcaccgcggcttccgcgtagaacatcagcgcataggagatcttcaccaactggttggcgatgatcgggccgatcgcgaagccgaaattcgcggcccacgtctgcagcgaatacgcgcgcttctgtttgcggaacggcaccacgtcggacacgtacgccgcgaccgcgggcgtcggcatggatgagatggcgccgtaggccagcagcgcgatcgccatgatccacggattgccgatgaacgccagcaggaccagcatcgcggcggagccgagattgccgatgacgatcatcgccgggcggccgaagcggtcggacagcgcgccgccatacaggcagccgaagatgccgccgaaaccgtacatggagacgatggtgccggccacgcccgcgctgacatgcatgtcagacaccagatacatggaaaggaatgacgtgacgaagcggcccatccacaggataagcagcgtgacccacaagccccagaacatgaggggcaatccgaaaatctctttgttcttctccattcttgccatcatatcgagcaatatcgagcggacgcgacgccagtagccttttcccggggtgctgggagaatggacaactatggcaatgaaaaaaggaccgaccaaggggtcgggtggaaagcatcgtaacgcgctgaggggcaagggaccgacccccaaggccgaagatcgcgtatatcacaaggcttacaaggaaaagcaggctaccaatcgtcgtaagatggctgatccgcgactggcggcacgccgtcgcgcggcaaagttcagctcagaatccgacgatctcgtcatcggtcgcaacgccgttctcgaagcgttgcgctgcggcgtgcccgcgagcacgctgtatgtggccgcacgcatcgagcacgacgatcgcacgcgtgaaatcattcgtctcgccggcattcacggactgaacctcatggaagccgaccgactggaaatggaccgtatcgcacgctcctccaaccatcagggcgtggtgatgaaggcgcagccgttccagtattcctcgctcgccgagctggtggaacgcgcggacaagaagtctcgtgccatggaagcggccaactccgcaagcgcacgcattgcggcacgtccgctgttcatcgcgcttgacggcgtcaccgatccgcagaatctgggcgcggtcatccgttccgcagccgcattcggcgccaacggcgtgatcctgccggaacgtcgttccgcttcggtcaccgcagccgcatggaaggtgtccgcaggcgcagccgcgcacatgccagtcgcccgcgtggtgaacctcaccaaagccattgaaagcctgaaggaacgcggatactacagcgtcggtctcgacggtggcggcgacgccctcgttggcgaaaccggtttcgaaaccgatccgctggttgtggtgctcggttccgaaggcaacggcctgagccgtctcgtacgcgagacatgcgattccatcgccggcatcccaatgtcgaacatggtcgaatcgctgaacgcttccgtcgcagcgggcatcacgctgtattccgtcgcacgcgcccgccgcgaggccggtgccgccgctgacgcgaagtaatcaacacgaagcgacaggaagtaagcacagcgaaactgcagaagtaaacacaacaaggcagcaagtccgaaatacatatgagcggatagtccatacggattatccgctcattttgttgcgcaaatctgtacttggattgattttgcgcttaccgcagacccactcccccgccaacgatctctcgcaacacgttctctcactttcaaaagtcaaaatttttttgagttttgaaagtgaggggtgtgaagggataacaaaagcggaggattattagtggtcctccgcttaacggctcggccctgaaatttttgactgcggctacgccgcagactcaatactgccttcggcgcggctatcgcctcgtctcagggcatattgatagaaaaagctccactggagctttttctatcaatgtgcccatacagctgcgtcgggatcgtcgtcggggttgtagccgtcgtcgggatcgtcgtaggtgtattcgtcgtcgatcacaccggaatcggcttcggcgttcaacgcgtccacatccttcgtggtgagcttgtactgcggaagcaccttctccacatagctttgcaccgcctcggccatcggcacatcatgacccgccttctcggccaggaaccaacggtggtcaagcacttcatggaagaactgagccggttcgatctgcgaacggtattcacgcggaatcatgcgcacggtcggctcgaacacttcgcgcatccaatcagtggcgacaatctcaagatcctcaccctcacgccatgtggaagcgcggtaggcatccaaatcgttcaacagtcgacgagcctgattctcctgcacatcaagaccagtcaatcgcagcagcttacgattcgcatagccggcatcgaccacacgcggacgcaccagcacacgcttgccatcttcggcggtcttcatctccagctcatccacatcaaaaccaagctcattgagcttgttgacgcgcttctcgatcttccacatctcatccggaccgaacttgtcggtatcagtcagcgcgctccacagcgaatggtaacgatccaccaaacggttgccgatcgcaatttcgtcaacaccgctcggcagcagcgaaccggacgaaagatccatcaattcgccaataatgttcgtacgggccaaatcaacgtcgtactcgcgctggccctccgtcagattaatctgcagatcaccggtttccgcatcaaccaaaaatgcggagaacgcgtaggcgtcgcgcaggaacaacacgttcgacagtgacacatcgccccaatagaagccagccaaatgcaaacgcaccatcagcacggccaacgcgtcgatcagtcgttccgcggtatcagggcgcagattacgcgcgaacagcgcacgatacggcagtgagaacttcaaatgcttggtgacaaggatcgcttccagcggctcgccttcacggctatgacggcctgtgaccacggcgatcggctgcacggtcggcagttccagcttctgcaggcgacgcagcagctcgtattctcgttccgccacattgcgcgtgatttccttcatggcgtacacttcgtcgcctacgtgcacgaaacgcaccacatgcctggaaataccacgcggaagattagccagcaggtcttccggccaagtagccagcggcttttcccacggcagggtgaacatctttggattcgagcttgcggcggtgattttcagcgcatgcggctccggagatgaggcagccggatcttcggccttcacggaagttgctttcagcacacggggatccatctgtggcaattcaagagattccatgaatcaacaatttacctgttgacctacccgaagaagcaagtatggacgaatccgtttcacctgccgatatgcgatgatctcaatactggaatctcactatccatctcatattacgatcgaatattgcgatcgatgctacaaacagacattacaagccgatatcgtgcttgcggaaaacaaaagaagccccgcaccgacgcggggcttctccaacgagacgataagagaggaagagcacgtctcgtttaatggttgacggaagttcgcgcttccgccaagtttttattcagccacccgccagccgatttccgtaaaggatattcccctgaagaaacagccaacggttggttactcgatatcagctcagttcagacgcagctcggtcgacggagcgaacaggtgcatcttggacgggtcgatcttgatcttgacggtatcgccgaccttcgggagagcacgcgggttcacgcggatcgtggtgagcttgttctgatcggacatcatggtggatgcctcagcagcggagccatcggtgatgatgttgccgtagatgtagccatcggagcccagatcctcaacgttcatgaccttgagggagaaggcgttggcgtcatccggggcggccagggaagcgtcttccggacggaagccgacgacgatctggttgttgtcttcagcggtgagcttgttgacggcctcggccggcagatccacggtgtcttcgccgatctttgccttgccgttgaccaccgggtgggtgttgatgttcatcgacggggagccgatgaagccagcgacgaagacgttggccgggcgatcgtacagctcggtcggagcgccgacctgctgcaggacaccgagcttgatgacggcgatgcggtcacccatggtcagagcttcggtctgatcgtgggtcacgtacagggtggtgacacccagctggcgctgcagagcagcgatctgggtacgggtctgcacgcggagcttggcatcaaggttggacagaggctcatccatgaggaagaccttcggctcacggacgattgcacggcccatggccacgcgctgacgctggccaccggacagagccttcggcttacgatcgaggtactcggtcaggtcgaggatctcagcggccttctcgacgcgcttgcggatctcttccttcggggtgccggcgatcttcagagcgaagcccatgttgtcggccacggtcatgtgcgggtacagagcgtagttctggaacaccattgcgatgtcgcggtccttcggctgcatcgtggtgacgtccttgccaccgatgaggatgcggcccttgttgacctcttcaaggccagcgagcatacgcagagtagtggacttgccgcagccagacgggccaaccagcaccaggaactcgccgtccttgatgtccatattcaaatcatccaccgacggcttatcgttgcccgggtagatacgagtaacatggtcgaatacgacttctgccatgatttgtcatcctttcagaggcaggtacgtgcctcacgatccgttgtaaagggatttcttttcggtgcctcgccttgcggcttacgacttcgacaaagccacaattcaaagcgttaatttatttctttggtttggcgaaggttctcttcgttgagccacgttccatgatacatacaacgctaaaactgtcaatgcgtgtcgcgagtcgcgctgtttacctacgctggcaaaagggggttaacggcgtagtaaatacacgcctttatcgccatcatgcaagacaatggtgcggagcgaaagacagaacagggaggttgcagtgcgcaatattagaatcggcgtggtcgaggatgatcccgcaagctgccagctggtacttgactatctcaaccgatatcagcaggaaaatgacgaacaattcaccgtttccgtattcgacgacggcgcgagaatcgtagagaaatatacccctgtttacgatattttactgctcgacatcgaaatgagcgaaatggacggcatggccgccgcgagacgcattcgcgagcgcgacgacaaggtcgtgatcgtgttcatcaccgccgcaccgcagtatgcgatcagcgggtacgaggtgcgcgcattgtcgtatctgctcaagcccctgccgtggttcgcgttttcacaggaactcaagaagtcgatcgacatggtgaggcgcaatggcgacgattccatgcttatcgaaaccagcaacgggcagatgcggctgaatcttgccgatattctgtatctcgaatcgatccggcataccatcgtcatccacacgttggaaggcaaactgtcgatcaatggcacgctcaaagacatggaagcgaaactcgccgaccaccatttcttccgctcgaattcctgctatctggtgaatctcaagcatgtgacgggcgtcgccgaccaggattgcgtgatgtcgaacggcgaacagttgcgcgtaagccgaccacgcaagaaggcgttcctcgccgcgttgaccgactatataggaggtggcaggtgaccagcgtgatattgccgaatgcgctggccggattggcaggaggactggcaggaggctccccttccataccttccgttttggtgaccgtgctttcggtgccgccgatgacgccaatcaccaacgctctgcccgacatcccccgttcttatacggcgatctgcgaatgggccgcgtgcatggtgtatatcgcggtgtcgtatcgtcgcgtgccgctccgacggtcgatcatcgtcagtgcggccggcttggcatcgctggtcgcggtgcagtatttcgacggcagtatgccgatctggttctggatcatcggtatgctgctcgcattcgcctgcatgtatgcgacgattctgctcggcgcgggcaccggcaaacgcgagggcctgtatattacggcgcgcgcgttcgtgttggccgaattggtggcgtcgctgcattggcagatcgttacgttcattggcgtgcgcgacggattcaccgattacgattggcgcgcgatcgcgctgcttgtcgttacgtatgcgctgtgcttcggtctagcttggatggttgaacgcggcaatttcagccaggccacacctaccttgccgaccgcttccgccgcgattgcgacgatggccatcatgatcgtcacgttcgccatgagcaatttgagtttcgtgtcgacgaatacgccgttttccggttcggtcggccaggaaatcttctacattcgcacgctggtcgatttctgcggtttcgcgatcctatatgcgcagcaggagcaggcgcgccgtattgaggcgaatacggaactcgcgtcgatcaacgcgcagctggaaagccagcatcaggaatacctgcaatcgaaggaaaatatcgaatcgctaggccgtcttgcgcacgatctgaagcatcagcttgcggcgttgcgtgccgaagtcgatccgaagcatgccgcggccggcttcgagcagctggagcaatcggtgcagcgctatagcgcgcagcagcataccggcaatcccgtgcttgacgttattttgaccacgaaagagcgcacgtgcgccgatcgaggcattacgttcacggcggtcgcggacggctcgctgctaagcggcatgtcgtcgatggatatcgcatcattgttcggcaacgcgcttgacaatgcgatcgaagcgacgtcgaaattgccgaaacgtgagcagcgtctgatcaaacttgcgttatacgagcagaatcgctttattgttatccgggttgagaattattacgattcccgattgaagaaggatgcggaaggcaatctgcgcaccaccaagcgcgacgatcagcatcggcatggtttcggcgtgaagtcgattcgtcatatcgcgcagcagtatggcggcgaagtgacgattcgcaccgaagaccactggtttgtgctgaccgcgcttattccgcggaaaaccggccttatggccatgtaggactggccataaggcttaaggcggctccgctagttttcaagattctgcgcagcggcatcgccgtcagacgcatcaccggcatcaccgcctgccgatgcgtcgccgccagcatcgccggcattcgccgcacctccagccgcgccgcccgccgcagcacctccagccgtattgtccggactattcgcagcaccaccgttagagcccccgttagtgccgatattggtgttgttcgtcacggtgttgggagtcgacgacgcctcctggtattggtccatcgcctgctgaacggcgtctttggcggcattcagcgcgtcaacggcggccgtcacgtcgttttccttgagattggtgccattggcaaggtttctggccgagtcaatcgcctgctgcaatgccatgcgcacgctgtcgtcggccaccatgccgtcggaattgtcgagcacggactgcgcctgctcgatcgcgtcattgagctggcccttcagacgattctgcgtggccagcactttggaagcgtcgacggcttcggccgcatttgtaatcttttcggccttgtcgttcatgctccgtgcctcggatgccatggctttcgcggatttcttcagcttgctgatgccctgcgacgtgtcgcacgacaggattttcgcttccttcgcgttagatatggccgcattgagcttagtgacggtgctgacgtcggcgacttgatcggcagtgaccttcgcgccggtttttccgatttccaaagcgtcggaaagcgtgttattggcactttgcagctggcttgtggaatcctggcattgcgcggctgcgctggtaatggctgatttcttggaattattcgaaagcatccaacatgcaataccgccaatcaaagcaatcacgacgatagccgcaatcacgatagcgacgattttgccggtattcttcggtggtaccggaatttcattgctgtaatcgccgtaaccctcgaaaacactgaaatcgcttacaccgttcacatcgctttcttgcgaagcgaccgtcggaggcttcggcggttcggacatgtcagcccccatcacctcggtatccgtcggaaattccagcctgaaattgttgtctttcgtcatacgtccttcttcatcatcgggcgctcagcatcgaccatctatacgccgaccccctagtttaccgcctaacacacccttcaacgcgcattcgccttaattaccttcttttccgcacttttcgataggcgcaaagcggcaagcggctcccctaaacacgatgcggtgaacgcactcaccgcaaccgcgaatccaatgggcacaaacagattgatcggagcatccgcaagttccatcaccaagcaaatcgccataagcggagcctgttgggaagctgcgagcaatgcgcacgcacccagcagagcatacatgccaatcgaattcgtgtgaaacacctgcatccacagaacacccagcacagcaccccccgaagcgccgagcgcaatacccggctgcagcacaccgccggaagcgccggaacggatcgtcagcaatgtgacaatcgccttcgccaggaacgaaaccagcaaaatcggcaccaccgccaaatcggccttggacgagaaactcaactgcgcggtggcacggccattgcccataacctgcggcacccaaatcgccaccacgccagtcagcaggccggcgagcggcaacatccacagaatgcccgcgcccgacggtttggacttctcggcccactgcgagccgcgacggaacagtgcgccggcagcgccgagaatcatgccggcaaccagtgcgaacgccatgtaatcgggggtgaacaggccgtccgctttgccgatcaggtagaacgcgtgcgtgcccttgaccagcgacgccacccacgaagccagcgcggaacaggcgaaagcgagcgtcaccgtttcgagggttatgtcggcgagcagaatctcgaccgcgaaaaacgtgcccgcaagcggcgcgttatacacgcccgcaaggccggcggcggccgtaatggccaccaacatacgggtgtctttcgcatcgagacgcacccaacgtgcgaaccgctgaccgaacatcgcacccaactcgcgcggcgccacttctcgaccgatcgacatgcccgtaccgacaatgaaaatctgcagcaacacatgcacgacggtctgccaaatcggcataatatcgccattcaccgcctttttgacggacggcaccttcgtactgcgcgtacgcaacagccaccaaatcacggcggcgacggtcgcgccaacggtcacggaaatcaagcaccgaatcgcaggaacgttgaacgggccggattcctgcgaattctcaacataaccgagcgcaagatgctcgacgccgtacagcataagcgtcagcaggccagcggccgcaccaatggccacacccacaatcgccaccgccgcaatcagcgccggaattctgccaatctttggctgcgttccttgaggattctgcgactcctgcgattctcgtgttttttgcgattcctgcgattcccgcatctgccgcactccttgcacaccgtctccttcgttcaattcgttcccccaattgtcccacctgccgcaacgttcatttgttacgccccgagcgtggcgatcggcagcaccagaatgccgtcatcacgccggtatgcaatatcaccacgcccgacaataaatgccatgaattcaggctcacgaacttgagatagaggatttccgcacactttttctttgaaagcatgtagtttgtccacatttttctccatgactttcaagtcgctcagcttaatccccaccgcagcccagcgaccatccaccaattcaagaatcacatcaacttcaaggcctttttcatcccgataatatgcgattcgattcgtgccacccatcgattcgagatacacgcgcaaatcacgaatcaccaatgtttcaaacaaatctcatactgaatcagagacaatagtgatgacgctctcagcttatccagcacaactcattgcacatcatttgatagggattgctgcgagagctgcatctttaggtcatcgacttttaattccaaacgtctgatataaagcgcctgtcgacggataatcaaatcacgcatatcatttccaccggttccagggttaccttcattcgtgcgactggaagtaacctcagcatcggggagattcaccctgtctaccgtgcctggatcttctattcgtattgtcttcctccaacgatgcatgcaccgttcaatacgcttttcgcctatcaactcaggaccgagccccgcttcgcggaacagcacagtgggagattcaccattttcagcactcgaaacgcattcacgcttgaaccactctgcatatcggatacgtgaaccagtaatacttatgaccgcaggcagcgaagccagatactgtgcttgttccggagagaatcgttcgtcgctcatgcttacttttttcacttcatcgtgcaatcatctgtatgggatttgccggccgaattgacatcccgtatgcggcgtctcatgcgcaatctgatcaaaatgaacgtaacaagtaacatgagccccgctgccgcggcaatgctgcctacggcggcacccgtacgaccgataaggccaggattgcccggctcctcgctcgggttattttcgggcgggacaacaggagttccagtgctaaatttcggctctactgtgatgttgagatcagcggatgtgtctccactgccaggaatcgagatgaggaacggatcacagtcgtatgctttgttggctttcgccgagctcgtgcgggagaccagatataggccgagcggcagattctggaaagtgagctgaccagctacgttagtggtgccggaatgctggtacagcttgtttttcgccgcgtgcgtagcgagcttcttggcagcatcgtgatattcacttgatgtcaggcgttcccaatcggcagtgaggccggaaaaatcgccgacggttttatatgaggagacgctaccatcattgttcgttgtgacggtggcgacgcgcacgatggaataggtatcgccggcaagcaatttgggcgaagccgtgtctcggccccatacggcattgatggtgagagcgccgaaagaatcagcttgcgcatacggcaccatagagccgaaggctgcaagaacagtgaggacgatagtaacggcggcggcaatcatggcagcaatgcgcgccgcaccatattcgcttccgctatgcaggtctaacatgtctgcccggtccttttcgccgtgatgaatgtgattggttatttgtactgtctggctgaggaggcaagtcaccgtccggctcgatatccgcagagtcagaatcaccagatgcgaccttggcgctcccactctgccggcgtcgccgctcatgacgctgccataaatgccatgcgataagcaaggcaatcagtgcaagagacggcaacaagtactgcagcggaatgtccacgtggaacgtggatttggcgtcatcctgctgctgcggcgcgtatgggatgcgatggccgcgcaccagcagccgatgcgtattgaccgcatacggcgtacaagtgatgagcgtgaccaaatccttgccgggctcaattgccagttgtttggtattggtcggcagaacggtagtgatcttatcgacctgatacgcatacgtgtctttaagtattgtgatgtagaacttgtcgccttttttcataaggttcaagtccgtgaacagttttgccgtgggcaagccccggtggccagacagcgccgcatgagtggacgcgccaccaactggtagtgaggtctgttcgagatgtccgatgccggattgcagtactttctcggaagtgccgtgataaatcggcaaggtctccttgagcttaggcacagtgatgtatcccatcatgccgtcgccgtcaatattgagcagactgttgtattcctcgtccgtggatgcggaattgacggcactggcaagagcgtcggtctctcctgcatcgttctgggcgagcttttcgttataggcgtgcgcagcatccagcaccttctggtactgttcctggctcaatgcttcaacgctggcgtcgtagttatttacggcgcggctggcgttgcgcataatgaggaagttgctgatcgtcggatagaacagaatgagcattccaccgagaatgaccagtaagggcaggatgttgcgcagtcgtttcatcgagcgttcttttcgcgaggaaaccgtgttgtgggcgtagcgggtgtgtgcccttcacgcccaaaacacggccatgctcgtcaggcgttcttgcgcttgagagtccaggcaacgccgagcgcgatgaccagcacaccaatcaccgtgaaggcgatggtacccatgccaccagtgccaggcaggatagcaccggacttgttctggaccgggatgacaccgttcgatgcggtctggttgtagctgttgccattgtcgttgttgtaggtgatggcgacggtggcatccgtggtgtcagtgccgtcgttcttgccatcaaccttcacgccgatggcgctggcgagcttgttgtagccggccggcgctttggtctcggtcagcgtgtactcgccgttctccagtccccggaagacaaccttaccgcttgcaggagtggtgatagtcgtcgtagtatctgtctcaccagccttagctacacggtatacagcgttcgcggtcgcactaccggcatcgacttgcacgaagctcatagcggtgccgttcttaggtgcaagtgtgaactcagcaccagcaagtcgagtagcgtcatcatcatatttgtcaccagtgtacttatcgacggtgaagccataagtgaagacgcgaaccttgctgggttcggactcaccggtgccaccgctgctcgggttgttggagtactgaattgttgcggagttggtgttaccaacaccgcccacaacagccttctcgttcagcgtggccgtgtaggtgacggtaatcttcttgccggcattggcctgctgcttggccttgaagtccttcatggcgacagtaagcgtattgtcggagaccgtaggagtggtgacggtgtagtcagtgttcacggtcagtggatcagtcacaccttcgaccgtaacggaagtgacttgtccaaaggtgaggccctgagacaacgtatccttgaagttgaaggtgtaggtgtcataggcggacatgtctggaatggtggaggtcagggtgaaggtcagggtatcaccgatcttcgcgtcagtggcgtccttaccagtgccgcctacctgtaccttcttgtcgacggtaggcaggtcgcccttaatgttggcagtcacattggtgctatcaacggaaactagcgtggcgtattgaccactggcgttggccaaggtcgcacccggcacagcgaccacgtagtagccgtagtcgagaccagtgaacgtcgccaagtacttaccgtccgtagcagcggcagataccttagcggtcgtgccagccgtgatgttgttggccttagtctgcgcccagttcgatgccttggtagcgaaagcaaccaagtcttcacccttcagcttggatacgtagtcgtttgctttatcgttgacgttctcgtcggtagcaccagtcagtccggaagcagtggagttcttgaagaacggcttccactcgtcagtcaacgtgtaggagacagccttgctgccaccgtcaccgctcacggtggcggagaacatcttgtaggcgttcacggtcttaccggcgaacttcgcgtcagtagtgctgaccgtcagcgtggcattatccgctgcgttggccgtggcgactgtcgtcgcagccaatccaaatacggtggcaatcgccgcagcggcagcgaaaacccttttcatcagtgatttcattactgttccttcctctaaatggaaatcttttctgtttggcagatacggtttgtctatgtagtcgtcacgcggcatgggcacctcgctttcgtatacggctggagcccgagcggactgtgccggattgaacgcgttgatcacgcacgtaccagaccacgccagctcccataagcagcaagccgaacatcagaaaccacatcgtgcccgcgcctcccgtatccggaagcaacgccgcattggtaacaatggccacgcgttccttggtgttgtaggagaccgatacttggtatccggcctccgcgggcttgatggtcttggtggtatcgccgtccttataggtcacggcggtttcttccacggtgtacgtgtagtaacgcacgatgtccttgccgttggcatcctgtccatccacgaatgcgaccggcagtccttgaatcaccttgcgccaggtgttgctccaggaagaggcatcggaggagtccaacgtcaccgtccatggattcttctgcgtcacggttgtgcaatccgcgccgaagcattgaatcgtctgcggcgtcaccgtattgccacggccatcggtatagtgcgcggcgatcttcagttcgaccgactgcggccgttcgaggttgccgtccttccacaccttctgcacggtcaagtcaacgctccggcagccgtccttgccgcacgggtcctggccgtcgtccggttcgggggtgagtccgccgttgttgtcggtcacggtcgcgtcgagcatgagcacggccttggccggggactggtaggcatcgagcttcgtcttggtgctgccgtccgtggagtcgaccacggcatccttgatgccaacccatgtggtaccagcgtcgccggatgcggagccgtgcacagcgctgctgtcgtatgtgttgaccacgtcgaacagcttcacttcccaacgatcgagtccggtgttcagcgcatcgtctgccgtgttcttctgcgagaagatcttgttgccgtcctgtgcggaggtgcgggcctcactagcgttcgcggccgccttgcggtaaatgcgataggtgttgtatgccttgtcgccgttgccgtcatcgaccggtccgaggatgtcgctcatggtgttgaagtcccatacggacttgagtttggtgttcgagaacgggtcgaccagtccgctggcaccgcggatcgtgtcggcgtagaccatgtggtcgtctgccagcacgccctcgtcgttcagtccggcgaagccgcccgtgtagcctgtggaaagatccttcacaccgtcggtatcctgagttgcccctccgccgaacacgtcatagccattggcgatgcccgttacggtggactgttcgacgcgcgtacggttgcccttgatgagctggacggtcaggttgctgcctgacccatccatatcaatgccgtctttgctgcaaggcagtttgatgacactatcgccgatggtgacaatcgccacgtcggtctgctgctggttttcatcatcagccttggacagagcaacactcaccttcagtccgaacaggttcacgtacagcacgtcgccttccgaaagcaccttgagatcgaataccttgccgaagatggccgggaaccacttgcctaaatcgatgacgccgacctgttccgccttgtcgaggtacaggagcttgaccagcgcgttcaccacttgcagcagcagttccacaagtacagagttgaccttcgcgtcaaccaaataggcacggctggtttcaccgacgaatccgccggcaatctcaccgctagtgaccttcttgagattgtcagacgtgcagcccttcaccctggccaaatccacgtatccaacaaaaccgcctgcgacctcacgtccggtagccttgtcggtggctttgccgtaattgtcgccatggtgtgtggcggtgacggtataaccgtccgggatgccggtgacgcgcgaatcgccaacgtgcgagccccagatgtcaagtacgccggccgtggcaccaagcagattgagcgcatccgtgccgagttgtgcattgtcggcggcgaccgtgccggatttgccaagatgcccgatgaagccgcccacgtagttcacgccggtcacactgttgaggttggtgaccgcagactgcttcacagagccattgatcagtccaccgccgaagccaccgaccgcaccggtgtaacgcttcgagtcaagcatgccctttgtggtggaatcatgggcgacaatctggatgccgtcgctcacaccgttgacctgaccgtcatagatgaaggtgcggaatgcttcgagcacgcccacgttgccaaccttgagcagtttgagcagcaggttggtatcctgcttatcgccggcctcgccgccgccgacggaagcgacgctggatacatcagcaaggccaaagaagccaccggcgtattgcccgccttcgacagcgcgcagcccgttaacagtaagagaagccgggtcattgttcggatccgcttcactgccggtgcctttggcggaatccttgtcaccgaggatcgcggcttgcaacgaaccagcgaaaccgccggcgttcagggcatacttggctgtggtattacccttatcgtccttgctctcatatgcgccattgaccgtgtatccccatgccgggtcatccgagctcacatgtgcaccgcgaatcgtcgtaaccgtggcctgcaatacgctgaccagacttgccgggttcgataccagcgagtcgaggattccttgcaggaatccctcggacgcattggtgtccacatccgcaaccgcaccggcagtggccacgccgataaatccgccgacattgttgcgcccttccaccttgcgcaggttggaaacgttggcgccggcagcggtgacaccctcggcaagcttctggccgttctggtcgagatcgccccagatctggccaccgaccgcgagaccggcatagcctccggcattaccggtaccgtgcgtgatgtcttcaccggtggccacgaccttcatacccttgcggtagccggccacgctcgaagatttgacgacgggcacaaatacctgtgccacgtcgagcatctgtcccaaatcaagtttgatgcctttgtcgccgaatagttggatagagccgaacgaggatgccgagccggattccatcgtgcccgcataaccgcctgccgcacgcatggcagagacggtcttgacatccatcgactggccatcggtgatcgtgccggtgcacatcagaccgacgtgtccgccggcgacgccggaatcatgcaagttcgcgccagtctgatactccgcacgaccggcgacgacgttgaatccgaagatgtaggattcgaggaacttgtccagggaatcctgatcagtaacagagcccgcaccatcgcccgtagctacctcggtaaattccttgccatacgcaccgtacttgccgatgttgtcggcccacgtcttccattggtcgtagctcatattgcgcaaaggaccagtgaccttcgagtgctcctcggtcgggtagaccacagacagcacgccagcgagattgccggccttgatgagaccgccaagcaaggagagcgaaccgccttgagcggtatcggccgcctccatgaagccggtgtaaccgccggcgatttcggcaccgtatacgctgcggatgcgcgcggcgtaggctacgcgctgcggcccgttgtatttgccgtcggtattctcctgcttccacgctgctgtgttgttgccccagatatgaccgccacgattacgacctgcatagccgccggccatgccgcggcgtgtggtcgtatccgatgccgcctgggcacgcaccgcgccgccgcacactgcggcatcggtcgagctgttgcgaatcgtcggcacgaagtcctgcacgagcgagagcaggttgtcgaggttgacaagcttcttgagcacgctgccgtcaccaagcacgttcgccacggctcccggctgcatggcgcccacgtaaccgccggccgaaacctggccgatgatgtatacgaactcatgagagctcgagtcctgaatatagccgccttcaatgtctccggcgaaaccaccagccatacccagtggatcgggctcattgttggcattcctatgatttgcggtgctggccagaacggaatatccgccgatgccgccagtcacatcggagtgttcaatcgacgagacgacgacatccagcacactgagtacatcgttgagattgacgttctggccgagcaggctcaggccaccgcccacagctgccgccgagccgatgtccattttgccgatgtaaccgccggcgtatcgcgcagcggtgactgcatatgtgctgtctttgctcagataggtgccatcgattgatccggcggtttccagattcttcggtgccttgacatcagtacggcgcagttgggtcacactggaatgggacacctgcacaccggaaccgtatccgatgtagccgccggcggaaccggattgcgtatcggactgatcaaatcgggtggcggaaacggtgaagccgggatcatccgggtcggaaatcttgttaccgctagttgcctccacggtggtggcatcggaatgcacacccgcgtaggagatgaatggcacatagccctgcaccacctgcaacaggttggcgagatccaccgtaccgaatttgccgagcaaactcaggccgccgttgccagccgaagcgagcgcaccggagacaaccttgccgccgaaaccacctgcgtatgcgccgccagtcacatggtcaaggttgacaacggccacggggttggtttgcacgcgggactgtacaccggccagcgttgagtcgttcttgagatcggtttcggagaactggttgaccttgccgctttggaagtttcccgcatagccgcccgcgatatcgccttcgacataaccgccgttgacgtacgtcacggtggtatacgtatagcttggaatcagatacggtacggcaccgagcaggtcgttcacggacagcaggccgcctttgatcaggtcatccaatatgctggaatcttctgcgttgctgagcgcgtcggcgaggccaccggtggtggagaagcccacgaaaccgcctgccacaccatcggacgtgctggtatcggctgtgaccgatttgaggtttgtcacatggctttcccgggtcttggtgctgttggcctgaccatagaaaccgcctgcagcgtaatcggtcgtttcgttgttctcgttcttgccggttgccgcaaccgtgaatccgccagagatgccgttcacgttcgatgcagtgactgcaaccgaagaatattgggcaaccgatagcagaccggaaagcttgataagcccaagcacattgagaccgccagcgccgatggcgtcgcctggtccagagaagccaataaaaccgccggcttctcccctggccgagaccgtggccagattggtaaggttcgtgttggccacgtcgccgccggtggcgcatccgatggcaccgcctgcataatatgaaccagccgtcactgtcaagccggatgccggagcggtgacagacatgttctccacggtgaacgcggcaaactggtcgaacttcttgagcgtggcaatatcgccaattttcaccacactgttgagcaacccagctaccgttgtcggttgcagatcgccggcgatgccacccgcgtaggagcccgtggccgtgaccgattcaagaccttctatggtggtggaacgctgctgtgggaagtcacgaagattgttgtacttccagaatgtgagattttgaaggcggttccgcgaggaatcaccgatcaccgtacccgaaccttcgcccacaaggccgcccgcgtaatcaccgccggcagcaactgtgagggaacccttcatttgtgtaccgagaatcacagaaggattcacaccgacgatggatagcagttctcctgcaccgttatcgctgccgctcagcaatttagtcacagccttggtgagctgtttcaacagcgatgcattcgtggtatcgtccgtaccgagttccaggccccatcccacggaggcgaatccggtgaatcctccggcgtgggatctgtcggcagtcacggcgaccgaagccgtaatcgaattattgacagcataggcattggccatggcaccgttgaagccgccggcgtagtcttcggcctgcacggtgatcttatcgtcaccgtttaccgtcaggccactgttttcgatgaggctctgcggacgcagcgcagacagcaagtcgacgccaagcgagttaatcagaccgcccacgttgccgttgcgacttactccggcaaaaccaccggcatattgcgttgcccgcacggtgaaaccattcgtgctcgtcaccgaagagttctcaatgattgcaccaatctgtgcaccgacaaaaccgccggcctgcgagttgtccttgttgccgatcaccacgttctctttgaacccgttcaccgaactattcgagataaccgggttgtagtagccaaccggaatcaaggcattcagcccgagcgtgccggacagcaaccagtccaccaaatcgcccagcccgaggaacgggatgacacccaagatcttcgagagtacattggtgagcgctcctacgatgccggagactgcatcgtatcgggttgcgccctcaacatatcccacgaaaccaccggtcatacggcttacgctagataccgaaacatctgctacctcgcagtccgtaaccttggtgtccccgtagatacggccggcaaatgcacccgtggcgaggttggaaggattgtctttgtgcagggtgagcagaccttgaagattgaggtcaagatctacttgtccgaatgtcaatagttttaacgccttcaacagtgtgtcgagcagtaatcccactgccgaagtgagcataccgagcaaggtcggcggaatatacgattcactcgtatgattcgtcaccgacacatcctgcagcttgaggttcgacaccacggccgtaccggcgctgcccagactgttgctgttcatcacggtcttgttcgtgatcgaggcgaagaagccgatgccctgctgcttgctgacatccagctggtcgcctttgacattagagaccatatctttctgattgacgaccacatggctgatgaccggacgagctgcggtagcgtgaaccacgcttgcgccatcggcaccaacagccttccacaggctggcttcggtgtcgccgtcattggagaccgcaccgagcatagtgccggagaacatgagcggagtccactcggtgttgttggtatctgccgcgttcttggacaggtcgatgtcacggaagatcaggtagttggcgtctgcggaataggtcaggccggtgttggcagcggagtagtccgtttgcgtgccatcagcacccacgccgtaatacttggtgcgggtcctgttgacgcttaacgccgtgcatgccagcagtggactgtcgtggtcggaggcatcagtatcgcgcaaaatatctgaatcggagagatcggcgtcaccggcgtattcggaagacggcgtgccgtccacccactgataattgagggctccttgctgcatgcaagtctgcgtgaccttgttgatgcggccaataaccttcttgccagaaccaatcgcacgcagctgctgctcgttaccaatcaggatgtaggtcttgccgttgatctccttcgtggcctgaccctcaaagtcacggccgccaagcgccgtcgcggcgacctgcacatcggccttcgccggcgattgatccgtcgcatttgaggaatcgttcttggcatcttgagaagaagcatcgtttggagcctgcgtttgggctccatcattagtggaattgccagcggtagcttctgctgagtcgtccgccttattgtctgtcgcaccatttgaggattcggaagaatcaccagtagtagaagatgaaggagatgaatcctgctgtgcgtcttgattcgtttcggaaggtgttggcgcaccgtttgatgtattggcctcttctgacgtcttatcgtcaacgttgacattgcgggcagaaggagcagctacgacagtattacccccccccctccagaaattacggcgttaggagagctactcacatcgtctatattctgagcatatgctgcaggcaccatgcacacgatggacaaggaaacagcaataaccgaagcaaggcaacgcttcaaagacaggcactgccgtccagattcccgttctgttcctccgttaaacccgcaacggacgaacttcaattccgagctcattgtctcccctcatagattcgcaatcccctttcgggagattactgcatacaactatacggaagaggttgacaaaagaacaaaaaacgttcatttgctggggccggttagcgtatgtctttctgagcaaaaagaaaagccccgcagctatgcagggcttttccaacgaggtcatgagagaggaagagaacgaccccgtttaatggttgacgaagctttaggacctcgccaaatcactcatcattccgcactttcaagtttatgccaatcccgttttcgattttacgctgttttgactttcgattttacgccaatctcgttttcgattttacgccggcaacactgctgacgattgcatttcgatattcagaaatcataagaaactacaggaaagcagcaaaaagggcataagaaagcccgcccggaaaaagggggaagaccgggcgggttgaggaagggaagaaaaagaagtcagctatgaagggttacttggccgtctccttggacttgctcttcggcataacccagaacttgagcagcgggtagctcacgatcacggcgagcagggtgttgaccacggaagcgatggtgccagcaatgccagcgcccatgccccaaccctggcacagaccggtcacatagcccggcagcacaaggttcacaaccacgatgatcacagcgaggatcacgtacttccaagcggcatccttgaagctggagtcagacttgaacacccacttcatctgcacgaagaagttcaccacctgggcgagcgcctcggcaagcaggaaggtgaggaagccgcccagaccgttgccctgagtgtcgtagttgaagatcaggaagtggaacggctgcgtcaggcccatgccactgatgaagatggcggtgccgatccacgtcaccacgaaacgggtgatggtggagatgttcgacagcacgttgaacaggatgaactcccagatgttcgggtggtccttgatccactggcggatcggaccgaccttctcagccggctgcgttgcgttgttatcagtcattgttcagctcctttgcagtgcgcttgtttgcggattggttgcggaagaagccggcgatgacgccgcccaatccgcggaaggtgtgtccgttggcgattttgacgatggcgtcgaccatcgcggaatcgaccatgccttgggtcatcttgctcatggctcgcggaggcatgttcaggatgaacagggtgttgaggtccggagcgccggtcttctgacgaatcttggcctcctgcttggtgagcgtcttggcgacggtacgcgccacgaagcccttggaatccacccacgacatgatcggatcgttcacgccgaacgtcaccggcttgcccggtgccacaacctcatggccgaacagcacggccatttcggcgtcggtcacttccttgacgtggccgctgagataatggccgagcgcagtatccgcggcaaccggattgacatcgcctgcgacggtgtgcggaatcgtaagcggcaggtgttcggcgttgtcgcccaccatcagcgtccactcgccggtttccgtcttccattcgttgctggcaacgtcgaagtgacggaaggtgtaacggtcgaaatcgatgtgcacgctcttgctttcgtgtgcggcaagcgaaaccttggcgaagcccttgagctcgcgatccggacgcaacacaccaccctgcggaccgcgcacgtacagctgtacaacggtcgaaccggcaacatcggaatcgttgctgaccatcacgtcaatgccgttctcaccagcagtggcggcactgtaggtgaacgtggagtagctcaagccgtaaccgaacgggaagcgcacgggcacaccggcggtctcgtaataacggtagccaacgaacgggccttcgcgatagatcgcatcgcgaccaatcgccggataccaactggagctcgggcaatcctcgtaatgcatcggccaggtttcagccaagtggccggacggattgatctcaccggtcagcgcgcgcacggtcgcggaagcgccggcctgacccgacagacccacgtaaagcactgcggcaacgtcgtcaatccacggcagttccaccggagagccggcgacaagcacgaccacgatcggcttgcccgcgcccttcagcgcttcgaccagatcgttctgcacctgcggaatcgccatggtggaacggtcaaggccttcggattcgctgcgttcgtcaagaccgacgactgcaagcaccacatcaacgctttccttgccagccagcgcgactgcgtcttccacgagcacgcggtcagccttgccctgacggtcatagccctgctcatagccggcaagcacgaggccttcggcgttcttgacctcttcaagaatgttctcttccttggtggcgttcaccttggaggagccggaaccctgataacgtgcggttgcggccatatcgccgatcaccgccacgcgggtgccggccttgaatggcagggtcgcgttatcgttcttcaacagcacactggagccttcggccaccttgcgtgccacgtcgtgatgcgctgctgcgatatcgtctttgagcagatcgttacgtccaacaccgaccagcttggtcgctgccgcgatttttgcgacttctgcggcacgcgcgttgatatcggcttcagacagagttccagccttgaccgcgccttccagctcacgcgcggaagtgaagcccggagacggcatttccagcgatccgcctgccttgactgctgcgaccgcggagttggatccgccccagtcggagacgaccatgccgtcgaagccccattcgtcgcgcagaatctcctggagcaaatgtttgttttcgtgcgcgtagacgccgttgatctcgttgtaggaggtcatgatggtcagcggcttggcttcacgcactgcgatttcgaaaccggtcagatacaattcgcgcatggtacgctcgtcgaccacggagttgctggcctggcggcgcagttcctggctgttaaccgcgaaatgcttcgggcatgcggagatgccgttgctctggatgccgcggatcaggcctgccgccatacgtccggcgacgatcggatcttcggaatagtattcgaagttacgtccgcacagcgggttgcgcttgatgttcagacccgggccgagcagcacgttcacgtcaagatcgtgcgcttcgctgccgagggcctcgcccatttcttcggcgagcgccggatcccaagaattggccacggttcctgcggtcgggaagcaggtggccggcttggatacgccgatgccgagatgatcgccttcgccgagctggcggcgcacgccgtgggggccgtcgctcatcacgaagctggggatgtctgcgcggtcgttgcctcgcgaatcccattcggatccaccggaaagcattgcggccttttcaacgaccgaaagttcttcgagttccattggttctcccttgcactaactcctcgaacccgcttggccctccctgagcctgcgctgttcttgttgcggatgttcttggctgcatcgcatgtgagcatccgccgctagtttgattgaaccagcctttcgccgccaatctgcgccccattacacaacctgtcgttttgcccgcacaatcggacattccttaactgatttcggaatcaaaggaactcacatggcagatacgtttttaccgctccgccgcgctttcgtatgcgttccatacacaccatacggcgtaggaaatgagtggacagatggtggcggaaataatcacgtcggtcggatagtgcaagccgagcagcaatcgagaacaggcgaccgccacgacaagcgcgacagcgccgatgaccgccctgcggaggaacacccgtcttccgtttgcacgcccgtcatcttctccgtcggggaagcgtttgcgcgcgaaattacgcacggtaagaatcatcatgaccgatacgatcaccgcggctgccgtgtgaccactcggaaaacttggatcgcctggcaatagatcactgccgacggacgtgatcggacgggggcgttcgaccagccatttgacaccggtcacgtacagtatcggcgccgccgacacgacgacatcgcggatgacgacgcgcctgctgccggtaatacgcaaatcgacagcggcaagcgcggcgacgattgcgatgcagcctaccgttgaaaacaaatacgcaagtaccgtagagcagtcgcgcaacccttctggcagcgccgctaaagcctgcaaaatattggtctcacgcattgtcgcgattgccgaattgcgcagtgcgacgccaatcataggcacaatgccgcacaatatggcggttgcgattaccacagccgccgctctcgcgatgcttccgttcttcatatgcatgatttcagttaagcacagttcaccataccgttgccgtatgttcacatccggggtatccccgaaaatcgaagattatccttcagggggcttccccgacacgcgcgctgcagacggccgcgcaacacaaatatggcatacccacacgggaagtaccgcgaacgatgcgagaatcggaattggcgtttaagaaggaaagaaggaaatatgaccgaaccaatcgcaatgaccatacgccatatgaaaatcgaggattatccgctggtatacggactgtggacacgatgcacaggtttcactatgagggatatagacgattgcgaggatgcgataaagacgtttctcaaacgcaatcccgacacctgtttcgtaactgaggacgatgacggaaggatcattggcgcgattcttgccggtcacgacggaagacggtcacgcatctaccacacggcggtcgaccccgacgcacgcggtaggggcattggctcgatgttggtgggccgtgtggttgaaacgcttcgtgcaatcggtctgccgaaagtcgctgtcggagtgcccacggacaacgacgccggcaacgatttctgggaacggcagggctttgcagtccgtgacgatttggtttatcgagaactgccgttggaataacgaaccatccacgatgccgtgcacgtcgcccagcccacgttgttcgcggacagcaagtagaagccggccagcatgccgccccacccatggacacgtaggcagcggaggcgatgccgcggcccaacgcgttcattacgtggcgcagcagccacgtgtcaagaggcccctgccgtaacggaagtccgagaggccaccgatggtggatcgctgttcggacggaagacacggtttaggcgagcgagctatgccttggctagcttcttgtgcctgagagtgtaaacggcatcggcggaatcggcgacacgcttggaatgcgtcaccacaatgacacatttaccgagttgatgagcggcatgccgcaaaagatcaatcacctcatcagtcatttccggatccaggctgccagtcggttcatccgccagaatcgcgcggccgggcgccactagggcacggccgaccgccactcgctgacgttgaccgcccgacaggtgcatgatgttgcgcttcgattcctcacggctcagtcccaaatcctcgaggatcttcatatcggccttgggattgaccaaacgcagattctcttcgggagtgagatagtcgatcagattatggtcctggaacaccaaggacacgtgctcgcgacggtgctttgaataacccgtcgtagctatatcctcaccctcgaaacggaccactccatcagagggggcatccagaccggccaacagggacagcagtgtgctctttcccgctcccgatggaccggtgatcgcatacatctttccggattcgaaatcagcgttcacgtccgaaagaacgcggatcttcgccgcgccatatgagtaattgacatggtccaattgcagacagatagtcatgattaatatctcctaacgcatagaggaaagaatggatttcggggatttggccagcactgcggcgcacgacacggcaagcgcaatcgcgatgaccgcgcatccgagcagcaggatgagcagcgtctgttctggcggcagagcctccacctgcaatgattcaagaggcgcgactccagaatcgtgcagcagaagcgaggacacgtatccagacaatagggagcccgtgcccagcgagcacagggctgcgaccacagccatgagaccggtttcgattgcgaactgggcgataatctgcatcttgccgatgccgagagccagaagggtgcctatctcatgaatacgtgagcggatccagaagacaagcgccatgcccagtaccaacacatcagccaagcaaacggacaacagcaccatacgaaccagatcgcgcaccgtttccaccgactgcagcacgccggaaagccgcgccgagtcatcggtgacgccatacttgcttccagcgatttttttcgcttgggccactgcggcggagagagcctgcggattatccgaaagacaccggatcgtgccgacccgttcctctccagtcagcgcggaaaccacttgggcacccgcatagataagattctccgatgcgtccgatggcatagggctctgtgcctgcacattgccagagaagattccggccacgcgaacggtggaatcgcggtcttcctgactgagccggagtgttgatcccaccgatagcccattctcacgtgcgaaatcccggtgaatcagtacgttccggtcattacctgaaatgtggtgtccttgttccaaccggtacagaccgctttggaactcttcggacaacgaggagtcagtggtgcccagcacgctgacctgcgtggatagaccggaatccagccgaggaccatgttcggggacaaccggatgcgctccatccacccctgccaaggtcttacgctcgtaaacggtttttcctacgccggggatgcgcgagaaccggctcgcttcctttagacttgcaggattctcgcctgtgtcgacagtaaaacctattcccatgcttctgccgatatcgtcggacattttctgaagtgccgttgacactccaacctgagccacaagactggtgaaaaccatcagcatcagcagtccgatgattccgctgcgtaccggtttacgcacgattgccagcgtggcacgattccacacgttcatgcccgtcatcggagctccgacaggcttcgcggcgacttgcgcagcatcggtatgcacgatatggcgacgcataccagcatcaccgccagcaggccgagcgacacatacagtacggcagtcgtgtcgatcgataccgtgagcgaatccaaggtacgaaccgacatattggattcgagatcgccgccaacctgccccatgctgctcagctccttcgccgcggaggcgttcacggaacggagggccgaagtgccaagccattgggccactcctcgtgcgcacaaccatccgagggccagggacggcagaccgatcagaatcatctcggttagatattgggcgatcagggatggcttgccgatgccaagggacaccagtacgcccatctcctgacgtcggtcgttcatccacagtaagagcatgagactgagaactatcacggccgaaatggtcacgccgatcaaagcgccgagcatcatggaacgcacacctcgggcggcattcagcatgctcgacgtatattggtcattgcgcgtgatctggtagttgttccaatccactggaagcttcttcgccgcttccatggttttctccacgtcgacacccttgtccagaacgaaagtggcatcctgatatatttccttgccggccttgtactggtacagagtacttgtagtgtccaaatcggtgtacacagtgttggaggtgagttccgcgcggctggatacctttctgtcgctgtctcctttgaatattccaacgatggtggttttgacggttgccgtcgaatgcgactcattgtcggcatcatatggattggccttgagcgtgagggtatcgccgactttaagtccattggttttggcgagatcctcatggaccatcgacatatgcttatcggatgtcttgagatgacgtccgtcgaccatgccgagcgtgtgcgacgtgaacacattgagttttgacgaatcgtttgtgcctatgacgttggccgtattgccgaactgctgttctttctccgcatcgtaatcatcgccgccggggaccttcaccacgctggctcccacgagatcggcggtggcgttctgcctgaccatgtacgagtcaacaccggacagcttcgagattcgttgcacatcagcgggacgaaccattccgcctccgcgaggtgtcagcatgctgccttgcaggttactggccagcacgaatccgccgaccgcctgtttctcaatctgtccggcctcatgttgcgctgcccgagaaactgcggttgcggacagcatactcgccgttatgatggtcagcacaatgaacagcactgcggtgcgcactcgctttctgagcacatagcgcgccgcccgtgagataaatgtcattaataccccctgtgaagctgggaccttctcatccgaaacaatgaaatctaattcgattcttcgattggtcattcgccaaaatacatggttcacctcggaacatggcaagatatgccttgagcgaaaaaacgaaacaacattggttgcattatgctccgggacatcggtcgttttgttcatttgacaaactttgaacggctataaaacagtgcatataccaatggaggccccaatcgaaattggggcctccatcagagagaaaggaaggagtggcaagtattggttatttattcggtcagaatcttggccttctcgttgacgcttcaaccgtctcgaccgtcttgacttcctcgtcggggatctcaccggccgcgagcttggcttcgagctgctcgacgatttcggcgtgtatcttctcgttgatcttcaccttgaaggcgaacatcaggcggactccaccgtccgcggctgttgcgttgctcattttttcttctcctctaagagagttggagccgaaatcacccattgatcttgtattgcaatacgccgttttataaacagaagtaaaaaacattagtaatcaaagcttttgccgacgtgttgcaacaattcccatgatgcaaagcctatccgtcaccgacttaaacatgtttaatgggagtacttgaaaaacagagggaactgtggcggtaaatacgatttgcttttcggtaaaaaacatttatcattactggtaaaggaagtttagcttcctcatcattcacaacgaagtaatgaaagaaagcagaaaacatgacaaacagcaatcgtgttgagcacgcatccgagacatggctgaccgacgcgactgtgttcgaggtcaaccgcacgccggcccattccaaccacaagtgtttcacgcatgatccgcagagcggtgagtactccgatctcacgcaaagccttgacggagagtggcgcgtcgagatcgtacaggcttctgacatcgatttcaacgaagagccattcgttgccgaaaacttcgatgattccgctttctaccgcacccaggttccgggccatctgcagatggcaggcctgctgaagaacaagtacgtgaatatccagtatccgtgggatggccacgagaatccgctggagccgaatgttccggaaaacaatcacgtggcgctctaccgcaagaagttcgtcgtgtccaagcgtcttgcggacaccaaggagtccagaggaagcgtctccatcgtcttccatggaatggcaaccgcaatctacgtgtgggtcaacggcctgttcgcaggttacggcgaggacggattcactcccaacgagtttgacatcaccgatctgctgcatgacggagagaacgttgtggcggtcgcttgctacgagtattccagcgcatcctggcttgaagaccaggacttctggcgtctgcacgggctgttccgctccgtcgaactgacggcacagccccacgtccatgtcgagaacatgcagctcgaagccgattgggacgccgagtccggcaccgcctctcttgacgccgcattgtccgtgcgcaacgcctccgatgccgccaccatctcagccacgttgaaggattccgaaggcaacgtggtatgggagacctcgaccaacgccgacgccaacaccacgttcgcgagcggttccttgcagggcctcgagccgtggagcgccgagagcccatctctgtacgaacttgaagtcaatgtcatcgatcaggccggcgacattgtcgaagccgtcgttcagaaggtcggcttccgtcgcttccacatcgaaaacggcatcatgacccttaacggcaagcgcgtcgtgttcaagggcgcggaccgtcacgagttcgacgccaagcgcggccgttccatcactgagcaggacatgatcgatgatgtgattttctgcaagcgccacaacatcaacgccatccgcacctcgcactatccgaaccaggagcgttggtacgatctgtgcgatgagtacggcatctacctgatcgatgagaccaatctcgaaacccatggcagctggtgcctgcccggcgacgtagtcaccgccgagaccgcggttccaggaagcaaggcgcgttgggaaggcgcctgcgtcgaccgcgtcaacagcatgatgcgccgcgactacaaccacccgagcgtggtcatttggtcccttggcaacgaatcctacaccggcgatgtgttccgtgccatgtacaagcacgtgcacgacatcgatccgaaccgccccgtgcactacgagggtgtgacaaagaaccgcgactatgacgacgtgaccgatatcgaaacccgcatgtacgagcatgccgatgtggttgaggaatacctcaagaacgatccgcagaaaccgtacatctcctgcgagtacatgcacgcaatgggcaattcggtcggcaatctggacgaatacacggcactggaacgctacccgcactatcagggcggcttcatctgggacttcatcgatcaggcgatttatgccagccagccggacggctccacccgtctgtgctatggcggagacttcggcgatcgcccgagtgattacgagttctccggcaacggactggtcttcgctgaccgtactcccgcgccgaaggcccaggaggtcaagcagctgtactccaacgtccatatcgacgtgaccgatcgttcggtgtccatcaagaacgacaatctgttcatctcgaccggcggataccagttcgtgctgcgcatcctcgctgacggggagccggtatggcagtccgagcgtcgcttcgacgtgcccgctgattcggcatgcacgttcgatgtcgaatggccggtagatctctatcgcgccaatgccaatgagctgttgcttgaagtgtcccagcgcctcgccgaggcgaccgattgggctcctgccgggtacgaactcgccttcggccagactgttgtggccggaacgaaggcagccgaagacgcggccctgcctgcggacggcatcgtcactgttggccgttggaatgcgggtgttcagggttccggacgagagattcttctttctcgcacccagggcggcttggtctcctacacgttcgacggtcacgaattcgtgctgcgtcgcccggcgatcaccacattccgcgcgctgacggacaacgaccgtggcgccggccatggattcgagcgagcccagtggatggcggccggccgttatgcccgttgcgtggacaatgtcatcgaacaggtcgatgaagacacgctcaaggccgtatacacgtatgagctggccacgccgcaacgcaccaaggtcaccgtcgaatacaccgccgataccactggccgtctgaacctgcatgtggaatatccgggcgaatccggcgatctgcccaccattcctgcgtttggcatcgaatggactctgccggtccagtattcgaatctgaggttcttcggcgctggtcccgaggaaacgtaccaggatcgcaagcacgccaagctgggcgtgtggagcaccgatgcgttcaaggatcatgctccgtatctcatgccgcaggagacgggcaaccacgaggaagtccgttgggcggagatcaccgatgaaaatggacacggcctgcgagtcagccgcgcgaacggtgccgcaccgttcgctgtgagcctgcagccatattccagcttcatgatcgaagaagctcagcaccaggacgagttgccggctccgaagcacatgttcctccgtgtgctcgccgcgcagatgggtgtcggaggcgacgattcctggatgtctccggtccactcccagtatcacatccccgccgatcagccgatcagcctcgatgtcaatctcgaactgatctgacgatcggatagcgtgtccctcctctgcgccttcctgtggaggagggacgacatcgtcttgcaaggttccttcaccttggtgtaacaggtgacgatgcttcataacgcagaagatgcggcatagattcatgttttccatatgccgcgtcttctgctcacatcaggcctctttcgtatggttttcataaagatggcacgaaactgtccctgaccaccaattttgcggaaatcctcacgtgctggtttacggatcgtctggtggacagcgcttccgacagcataaacaccgcggccttagctaattcgtctttgttgatgtcgtacgatgacaacgcgggcgaggtatactccgctatctcttggttgttgatgctgaccatgcgtatatctctcggcactaggattccaacggacgcaaatgcttgaagtacgccgactgcaatcggatcggcagcaatgatgacggcatccggaaggtcgttactgtgcatttgtatgagtttttcaccgagagcgcgtccgttctctatggtgaacggtccttcttccaagacgagaccgttgatgtcaagtccgagacgtactgaccaattccggaacgcgaacgcacgggaatcttccggatactcatgatcgcccataatgtttccgactccgccgacgaaagctatgcgtcggctcccggaggcggtcagcgtatccaacgcgtccaaaacggtttgttccaaatctggttgcaccgaatcaaacaagtctggtgccggattaatatcgatgaatactccatgctgaaaagcattatgcaatcgtaggagcacatccttcccaaacggtgccggaccgatcgaaataaaaccagcatgcttgcccttattcttgatgagatcgttcacattacgatactcagttatatgcatgcgctcatcttccgcatgctggtagaggaacgccttgagctcgttggagtacatgtcttgcaaacctttgtccggaacggcattgtccaacaaggcgatgtcctgaggaatggtgacacgctggtatcgcggcacattctcatatcccaattcaaggctggcgttcagaactttttgacgggtggcctctttgaccgacagcgaggaatcgtcattgagtatcctcgatacggttgcaggggagaatccagccctttctgcaatctccctgattgtagccatgacaatctacctcctcttggtagacgaaagctaaacaaatttagtaacaagtttatcatgtttcgctttagagattcactggaaaatggcgggaatctctttttccgtcaaaaaagattgcggaccgtcctcccctattaggaaagacggtccgcaacatttcgtaacggatataacgcaatacgttaacgccggatggatcccttgaatggcttatccggagatagcgcgacacgtcccatatcagtccccagaacgttcagcgtaatctccgtgggcttcgaacagcgcaacgtatattccactgtctgatccgtccatgtcgcatccacttggattccgcctcttgcgcggagcgcatggaaggttccctcatgccaatcctccggcagggccggaagaatgcgaatccagccatcgtggctttggacaagcatctccgacaaggccgctgggaatccaaggttcccgtcgatctggaacggcgggtgagcgcataatccgctgtcgtacacgcctccgcccaacagattggtttcagcgttcgcatccaccggccgcaggaacatgcctatgattcgtttggcatgctccgcatcacgcagacgcgcccacatgatcatgcgccatacgatgctccagccggagccatcatcgccacgcacttcgagggatttcctagcggcttcctccaggtgcggagtcttagacgtgatgcctgcaccaggatgcagttcgtaaaggtgggacagatgacggtgctgtggatcggattcgatgaattcgtcgttccattcgaggattcttccatcagctcccaatcgcgtttcagccagttgggaacggacggcttccgcttcacggaccagatctctgtcctcttcgtcaaggttttccaaatcgtgagaagcctgaattaaatcatcaagcagattacgcacgatggccgtggcattctcactgctttgtgcaacggacaccggttctccgttcaccaagaaacagttctccggtgatgttgcaggggacggggccagtccatgctctgtctccgataggaaatccatgcagaatcgcgcgttgtcccgcatgatcggccagatgcgggccaggtacgatgcatcctggttgaacagatattcatcgaacaggttccggcacatccatgcctgaccgaacggccagaacgaccacatcgggtcgccgttcgcaggaagggctctgcgccagagatcgacattatggaagaccgccgatcctcggcagccaagaatcctgtcagcagcgtcgtgccccggcgctagcagctcctcattcatggagacgagcggctcgatgagttcttggagggcgcatgggcctgtcatccaatagttcatctcgacgttgatgttcgtcgtgtaggcgctgtaccagttcgggaaatccttatggttccaaatcccctgcagattcgccggctgggtgtgtggcctggatgaggagataagcagataccggccgaaatcgaacattgcctctgccagcatctccagacgatgcgattctttgttctcatccgagcgaaggatcgccgagaacagtagttccgcatcatcagcatgggctgaaccgagatggatggccaccctgtcgaaatatctgcggtagtccgcgatgtggcggtcgagcatggtctgcaggtcagtcgaccactcgtcaatggttttctccagatggtcggcgataaccgtcatgcttcgttccggctgctggtcgcttcccttgaatccgctcatactgcggaagcggagcgataacccggtgatgttcgaacattgcagactgttgtcgcccacgttgatgtcgccacctgttacggtaagggagaacgcaccggcgtacgccattccggttccgtcctgctcatcttcccaaggattttcggaagggtgaggcagaagtccgatgttgagtccaggcatccgacccatgacgatgagggtagcccgatggccgtcggataccgtttccaacgaagcgcgtgattgcttgaggaaagtgccggagacactgatattcacatcaatcggcgcatccgatgacatcctgtagaccaacaggtcatcaggctcgctgcaccatgcgtcgacatgaacgttggcatcacccatctggaacgtttcaccggcgagcgcccttgcaagatccagctggcgtttcatgctctcacggccgtctgcagaggtcgagtactgaatacgggccgttccgaatggctcgtaaatctgctcgtctttttcctgcagtgtggcttccttgatgattcgcgtggcggtggcgtaatcgtcatgcaacgacgcctggcgcgccttggccacaatctccggcgtcaccggcgaggtttccgcgtgtggatatcctgaccaaagggtgtcgtcgttgagatacagcacgtcggtttccggttcggagcacaggaccgctcccatgcgtccattgccgagaggaatgccttcttcccagcacgaagagattccatcgaatgtaagtttcatgcgtaaagtctccttggcagatttgcttatttgagaatgctctggatattgcggtactgttcgtcggtcagctgcacggcgggttcatggatggacgtgtcgattggcagtcccttcgccttgaccgcgcccttgatggcgctgatgaacaggtcggcagtgtcgtacaggcgcatcagataggaaatgcgttcagccgatttgatggccgtggcgtaatcaccggactgccatgcatgatgcaggctgacgaaagtctccggctccacattggtcaatccgcacagcacgccattgccgccactgattcggttgacagtgtagtactcgtcgaatccggacagcacgctgaacgatggattcaccttacgaacggcagcaatgaccttcctggtgtggctgatggtgtcgacggtgtctttgatgccgatgatgttctggttctccgctgcgagatccgccaccagctcaggggtgaggtcgttgcccgtcctggctgggaagttgtaaagaatgaccggcaacgtcgttgctttggccaccgcagagaagtagcgcttcgcgcaatccggggatggtccgaaatagtacggggatactgcaaccaatgcatcgactccggctgcttcgctctccgccgccaatgttctcacattgtctaggttggtgtctcccactccgacgagcaccttcatgcgtccagcgactttcgagacggcgaaacgcaccgcttctgccttcgtcttgacgtcgatggcgtagaattctccgatgctgccgaacagcagcacaccgtcgatgcccgcgtcgatgagatgatcaaggtgcttgccccaattgtcgtagtcaatggtcccatccgcgttcgtgatggtgatggaagggcagaacacgccttcgaattgggcgttgcaagtcatgattttttcctttcgacgatatggtaggcgttccgcgcgttattgaggaagaagtcgtcgtttcccgcgaaacggttgagcaggattgacagatgactgtcgaaatcggcgtatagaccaacgacaggccaattcgacgcgtacagcaacctcttgttcgagaacgcggcttgtgcaagatcgagcagggttgagacgaatcgtgggtcatcggttggataccccgataccttgacgtacacgtttggcagctctccgagcctatgcagagcatcggatgaggattcgagattgtgaagattggatatgttgcccatatggtcaacgatgacggtcgcttcgggcacctgctcacaagcctgagctaaatcgccaagctcatccactcttacgcatgcgtcgaatggcatgttcttatcggccataagctgcaaaccgcggatgaagtcatcttgcaggcaccgtccccgcggcgatgtcggcgtatgcaacggctcacgaacaccatgcgcgtacagcggcacgcgcatggccggtccgacggtggaccgcatagaggttgccaacagcagaggatcatggttttcggacagcagccgatcttccaatgacgtatcgtccgtgtcgacttccacatacacaccgccgatgaaattgaccgcagcgtctgggtggtgctcattgtatgaggcataggcgcgtttgaggcagtccatgtcgtaacggcgtgtgatggacccatccgtaccgtcgagccatgaaagcggttggacggatgggtcccagatatggaaatgcgagtcaatgatcctctgcatgtcgcgcgtcctagtcgagtgccctatcgaggtggacgtatccgccgtcggggaagacccattgtccggtggtgtgcgaagatctgtcggacagaaggaaaaccacggtgtccgcgatttccgaagtctcggtcatgcggtgcccaagaggaatcctgtcggtgatcttcgccaactgctcacgctgcgcctgctcgtcgccgaacgtcttgatccattgcgcgtacagcggtgtccacgcttcggccacgacgacggcattgactcgaacctcgtccggggcgagggcggcggcccactcgcgggtcagacccagaatcgcgccttttgccgcagcgtaggcgctagtcttgccctgaccggtcaatgcggtcttggaaccgatattgaccactgagcccttgctggccttgagcgctggcacgcactgatgaaccagctcgtaatagtgggtcagattgccgtgaagagactcctcgaactgacgccatgacgtggtctcgagcgcgagattgtcgtttctgccggcattgttgaccacaccatcgatatgaccgtatttcttcatgaccgattcaacaatgggggcgatctcgtcggtgttgtttaggtcaatcagataggtgtcatacgaatcggtgatctgttcgatatcctgtcggaattcgtcgtcggcaccatccgaacgattcagcaccaccggaatggcgccttcttcggccagtcgcagcgttatgcccttgccgatgcctttgaatcctccggtgacaataatcaccttgttcttaagatgcaggtccatctcaggtccttccgactagtccttgtgcaggtacttcatgcattcgtcgagcttcatctccgtgccgttgcccggagcgagcggtgcgacgtatcgtccgttcttgatgacagtcggatgtacgaaatactcatgctggttgtccacgtattcgacgacgcggtcctccatctcgccagagacggacacgtaatcgaacatcgcaagctggctgatggcttcgcacaggccgacaccgcccgcgtgagggcagaccttgacgccgaacttcttggcgagcaggtattcgaggacaatttcctgggggccggcgactcgggtcgcgtcgatctgcatgaccttgaagctgccagcctgcaggtactgcttgtacatgactcggttctgcatctgttcgccggtggctaccggaataggatcaatggccttctggattgcggcatggccaagaacgtcatccgggcaggtcggttcttcaacccacgcgagatcgtagtcattgaatttgccgatccattcaatggcctgtggcacatcccagacctggttggcgtctacggcgatggcgatgtccgggccgaccgcttcgcgggcgagcttgagcctgcgcagatcgtcttcgaggttttgaccgaccttaagcttaatctgcttaaagcccatgacctcggtctcttgcttggccaaacggaccatcttctcgtcggaatagccaagccatccggcggcggttgaatatcccggataaccgacttccttgaggtgggcgatgcgttccgccttacctttctgggctgcacgcagaatctcgatggcttcctgcggagtgagggcatcggtcaggtagcggaagtcgagagtcgcaacgagttcttcgggctccatctcggaaaggagcagccagagcggcttgccggcgcgcttggccttgaggtcccacagagccgaaagcacggcaccgatggccatatgctcgacgcccttctcaggaccgagccagcgcagctgcgaatcgcgcacgaacagatcccatgcgagacgcatgttatcgagcagttcctcgacgttacgtccgatgagggtttcggacatggagtcgatggctcggacgacgacatcattgccgcggccgatggtgaagacgaatccgttgccggaatcaccggcatccgtgctgatgacaacgtaggcggaggaataatccggatcggggttcatggcgtcggagccggagaaggtggctgacgtcgggaatcggaaatcataggtggtgactttggtaataacgctcacgatgcgcttccttctttggaaaaatgtttaatctcaaaaagggaggacggccgtttggccgccctccctatcagtggcgggcaaacggatgtcagtcggcgtcggtggtgaccttaaagccgttgtcttccgcgtatgccttgagcttctgctgcgccttggccatggcacctaccagatcgccgttctcattcatctcaggcacgatgacatcgttgaacacgacctccacttgggacatgaacgggagatactcccaatcggtattgacgttatccatggaatcgaaatagaccgagttaacgtccgtatttgcgaagtatccatcggcttcttccttctcgcgcacggccttatcgtcctgatagacggaagccgccatgaagtaattgccgctgttggtgtcctgccaagactggatggcgtccggagcggaatcgagccagttgatgaaggcaagggctgctgcttgcttttccttcgggcatgccgcggcaacgctcatcatggaaccgacggaggaggactggaaatgctggttgttccaggatggcggagttgtgaccaccatctttcccttgaggctcgggttctggtccttatacatgttgcccatccagttttcgctgatgaaggtggcataacggccatcattgaccgaacggttgaactcgtcagtgtagacggtgccgccttcaaggacgccatccttcaggcacttctgcaggaattccgtgaattcctttgctttgccgctgttcatagtcagttcgacgtcgtttacggaattaaccttccacagacgcgctccaacggaacggtagaggttggtgaagatggagatgtcggatcccagaattcccatatacttgttggaatcttctttgtggagcttcacaccctcgttgtagatgtcttcccagctttctggcacctgcaggttatgctcgtccaggatatcctttcgcacatagttggccaacggcgtggcgtcctgcggcacaccgtaaaggccgccggcgtaatgcacctgagcccatgcagtcttggtgtacaacttgctccatgctttgtcgatgctgtcgttggcaaaattcagcaatgcgcccgaaaccgcaaactgctggaatttattagcgctcatctgtacaacgtcggggatgtctttattggcctgaacgacattctggaacttggtgaaatggtcggcagcggcaccggtgttgacaaatttaatcttgatatgcggatacttctcctcgaatgccttgacggtgggctccatctgcttggcggaataggcccaaacggtcagttcgacgttcttcgacgtatcggtcagagcgctttccacttccttcgcggtcacttcgctcttagcctggcttccgttggtgtcggaaccacatgccgagatcccggccgtcattgccagcgccgcgatagcggccacaagcctgacactcttcttcttcatgattactcctttgtgtgtcatgaattactattttgttgttttttcaaaaggacggatgccgcacggtcaccaaggcaacgaatgggtgatcgtagggaccgtgcggccgagggttcactgcttgacagaaccggccgcgaggccagactgccagtacttctgcaggaacatgaatgcgatgatcaatggaacaactgcgataagcgagcccgtgatgatgaggttgttcggaacctgaccgttggcagttccctgggcacccatcttcagccacatgttcagaccgactgtcaacgggtagtcgttggtgtccgagagcatgatcagcggcaggaagtagttgttccagacgccaaccagcgtgaacagcagtacagtgacgaaacctggagacagcagcgggaaaccgaccttccagaagatggtccaagtgcttgcaccgtccagtttcgcggcttcaatcagcgagaccggaatcgaggtctgcgcatagatgatcatcaaatacaagccgaacggcgtagccagctgcggaataatcacggcccatggagtgccgaccagcccgattttcgaatacatgaggaacagcggcacggtgattaccgtagaaggaattgacatgaatgccaaagtgacggccagcagggcgttgcgtccggggaatcgcatggtggcgatggcatacccagcgaaagtggcaatgatggttgcaccaacacctgcgaccgctgcgtacatgatcgtattgaacagccagcgggtataggcgccattctggtaggcgaatgtgtcttgcacgttctgccagaacacattcttgtcatcgaaccacagaccaaaagagctaaagatgccctcactggtctttgtggaggagaagatgacccacagtagcggcacgaggcagtagatgaccatcaaagccataatgatgtgcagcagccagttgagcacacgctgcttgccggtcagcttcggagccggctcacgctgctgcatgcgcttgtaacgcttgcttgccttaagcgccagtttggcgtctctgcgctgcagcgacttggaacgtggttttgcgattgcttcactcatcacttgttctcccacttgttgccgataatcttaacgacggcgaccaaggccatgacgatgatgccgacgaccagagagacggcagcagcatagttgacgttctgaccattgaatgcgaggttgtaggtgtagatgttcggcgtatagctgctgttgatcacgtccggggcagaagtacgcaagatgttcggttcgttgaacagctggagcgtgccgattacggagaagaggactgtcatcacgatagtactcttaatctgaggaatcttcacggaccaagcgatgcgcagctccgaagcgccgtcaatacgggcagattcgtacaggtcgttcggaatgccgatcagtgcagaataataaatcagcatgttatagccaaggaagcaccaagtgcagatgtttgcgatggcgaatagcatgagctgcttcgacagcatattaggagccgttacgtcaagcatgccggcgatttgtccaaaaagaccatacttatcgccgtaaatgtatccccacatcagcgctgcaatgacgcctgggacggcataaggcaggaacagcaggattcgcggcactgcgatatggcggatcctctgggagtccaagataagcgccgctacgagggacagaatcagattcatcggaatctgaatcgccgcgtaaatcagcacattcttaaagccgccccacaaagcctcatccttgaatgctcggatgaagttgtcgaagcccgcgaatgtggtgccgccgagaagggactgcttgaagaagctgagataaagcgcgtagaacatcgggatgatcatgccgaacaggaagaccaacacgtatggaagacaatacaatatgcctatgtactcgcgcttcggcttgcgcatcccggaagtatccggtttcgccgttgcatttgtcatagtttttctctttcttcttaacccgtctgaatgagcctgccaacaacatcgttgccattgccatttcatccagcggtacattcaatatacaaggttctgcgaaaaagagcaaataaaacttcgttatgcgtggcgaaattttctttatcttattttttggcctcggaaaggctttattgcaacgatatatgcacattacatccatcaggcaagcagcagaagatcaacgtccatggcacacatttccgctatatagacagcaacacgccgataaaatatctatttcaaggtaacgaaaatttcgctatcctgtaggtaacgcttttttacagcgtgcatacgaaaagagaagagtcatgaccacaatcaaaacaacaaacagaccgaaggtctccgatatcgcccaagcggcgggagtatcccccgccaccgtatccaaggtcatcaatggccgcaatggagtctccgacgagacccgcgatagggtggaactgctcctcgaagaagccggattccgcaaaaaacttcccacaaccaaaaccatgcggtcaatcgaactggtcgtcaacgaaatgaccaacaacggatccatggagatggtcaaggagacaacttcatacgccagagattttggcatcggcatcactgtaagctgcgccggaccggattccgaagaacacgcgacaagaaacgaggccagcagctgcctccgcagcgccatcgaacgcaacccactgggcgtcatacttctcttatcaaatatttcatcggccgaggaatcgctactgcagacgaggaacatcccatatgtaattgtcgatccggtcgggcaggtctccgctgacgcattgggggtgggcattgataactggaccggaggaatgctcgccacgcaatatctcatatcattagggcaccgacgaatcgccgtcatcaccggccccaccaattcacaatcctcgcaagcgcgacttagcggatacatggcggcgctgcagaaaaacggcatcagcgcggatccgcatctcatcaaggttggcgactacgtatccgacaaggcatacaaggcggcatgcgatctcctggaaatgagggagcaggaccgaccgaccgccatcttcgcgttcaacgatctcggcgcgatcaacgtctatcgcgccgcccgacagcacagcatcagtctgcccgaacagttatcgatcatcggtttcgacgatgtctatcctgcggcaagcatgtgtccatccctgacgaccatcaggcagccattcaatctcatcgccagacaatgcatcgatctgattctcgaagcacgggaaggaaaggtggaacagaattacttcattcttcccacacagcttgtcgaacgcgaaagctgcacatcgccatcactgctgtaacacgcagcggcactcagaatcagcttccacgaagcacccatgcatatgtaatccgtctctgtcacaagcatttatttctgtttaccagatgaagatacaaaagaagcgatgaaactgacgagatttcacatcagaggtatgcctacaatgaagccacaacagaaaaacggctccgcacgaagcatgaaccaacaaacgaaacgacgagccgggtgaaaggaagaaaaatgcagaacaataccttcgaccagatcgccagcgccaacaccgtttccatggatgccggcctcagccagttcgccttcgccaaagcctcctctaccttgttcaagaaggttttcagcaagtaagattcctaaaagtctttatcaaacgcctcggctgctgtgatgaaccggttcagcagccgaggcgttctcatatatgctcctgtaacgggcagagacctccccgcccgttacagaccgtccggcggccagtcgaaacaaatcgcggttacgcgccgaccaattcgagcatctgcggaatgctcttcttgccgaactcgacccgctgcgtgccgtcggcccgtgtgatgacgatgcaaggcacgctcatcgcaccataatggtccctaagctcggggaagtgcgcaacatcgtaggcctcggcgcgcacggccaggttcagcgaggcgatgcgctgggaagcaagcacggtctccgggcacatcgtgcaggtgagcgagacgagaatcatgatattcagcgggcttgcaatggactttgcccgttcgatcagatcatcgcccaacggctgaccgggaccggccgcgttgtacaggcccagcacgaacgaattgaattcatggccggagggcacgccatggaaggcgaggccggtcggcttgccatccaccaccatgcgcacgcatggacgtgctgccggcaacacgtgttccacgtcgaataccgcacgccccgcatcatccttctcgtactcaccatcgaccactaccgatttcagcttgccatcggataacgcgaccatcgcatcaatgaatccccgcagttccgtggacagcggcgtatcatccagttccaaagcaagcgtgaccgggcgagacatacggttaaagaccacgttgagctgctgtttggtggtgtcggagaataattcgccgggcttcctgacggcgtttgctgcggcagcggcatcggtgctgcgtttgacgggtgccggtgcgggcgtggtgtcagccaacgaggcggcatctgtcttcgccgtggactgctcgtagacgcaagaggtcgggcgctgtggtatcaaaccggttttctcgctcatccgcttggcataccgttccaactccaccgcggcaatagcaccatcggcggtggcagtaacaacttgccgcaggtttttggcccgcagatcaccggccgcatacacgcccggcaccgatgtttcgagatagccgtgcgtgaccacgtaaccataatcgtccagttccaccacaccgcgcaccagattcgtggcgggcacatatcctgcgaacacgaacacgccgaacgtgccaccgtcagcaggtttccacgtttcggtctggccggtggcccggttcaggatcgtagcttcacgcaaaccgccttgaccggcagtgacgccttgcagctcgacttggtaacgcacgtcgatttttggattgtttttggctgcggcggccaccgtggcgtcgcaagtaaaatcctgttcccgcacgagaacggtgactttggaggcgtatgtggtcaggaacacggattcctcggctgctgcgaaccctcctccgaccaccagtacttccttgccggtgaagaattcgccatcgcaggtagcacagtaggccacaccgcggccagcgtattcggattccccttcaaaccctagtttgcgtgggctggcgccggtggcgatgagaataccgaaagcctttaagtcgccgcgtgaagtatgcacggttttgacgtcgccatgcacgtcgaggccgatggcttcggcggaaaggaattcagcgccgaagtcctgcgcctgctgacgcatggtctgggtaagctcacggccagtggtgcggccgacacccggatagttgaccacctcattggtgatggtgatctgtccgccgaaatcgtctttctcgagaatcagcacgcgatatcgggcgcgggccagatacaatcccgccgtcagaccagcgggaccgccgccgacaactatgacatcatacaaatcatttcgagacataatgaatcccttcgcgccttaatctgtctgttcaaggggttgcccggaggttctccggacaacccgtcggattagattgacaatccgtccgtcaaataacaatcacagttggccaacaagatcgaggctaggttcgatggtgtcctcgcccggagtccagttggcagggcagacctgatcgccatgttcgtggacgaactgagaggcttgcacacggcgtagtagttcttcggcattgcggccaacgttggaggagatgacttcataggccacgaccttgccttcggggctcacgatgaaatcaccgcgttcagccatgccatcgacctcgttgtaggtatcaagatctttggccaatagagcggtcgggtcagcaagcattggatattgaatcttggcgatcttttcattggcatcatgccatgccttgtgcacgaaatgggtatcgcaggagacggagtagatttcgcatccgatttccttgaacttggcgtagttgcgagccagatcctcaagctcagtggggcacacgaaagtgaaatcagccgggtagaagaaaaacagggaccagtggccgagcacatcagccttggtcacctcatggaactcgtcgttctggaacgcgttcaccttaaaatcggtcagttcatgctgcagaagagtcatcatcggtcctttcgctgattgtcaatcatctggcttctgccgttttctatcgtaacgtgattctctggaacccgcgcgggtataacgcgtgagactctgttcctggttcaaaatagtttctcctctctgatactgattttatcaatgatatttcgcaatagccagcaatgaacgcttgcattgcgcaagacgttacattatcttctgaaacatatagcgcaccttgtccaggcggctgtttggacggcggggctggatgactggcttgccgacagcggcctgataccctttcagttctgtaaggcatacgctctgcccgttggtgtaaaaggccagatcagtacggtatgcctgtatacagcgggcgggaatctcgccagtaaagacaacttcatccttttttacctggaccgtttcgatggtggcacagtatttcggtgcatcatgataagccctggaaagatattcccggggcgcatagagggtgaaggagagataaggttccagcagttgcgtccctgattccttcaatgcctgttccaatacaatcggggccaatgagcggaagtccgccggcgtgctgaccggactgtaataaagcccgtattcaaagcaaatcttacagtccgttacgttccagccgaacaagccctgctccagcccgtaacggataccatccctgacagcgttttgaaaactctggttcaagtatcccagcgaaacccggctctcgtattgtacaccggagccaagcgggagtggtgtaacagacagtccgatggatgcccaaaacgggttgggcggcacctcgatatggatggtgtggctggctgctttgagcggccgctccatataaatgacggtgggttcctttaccactgtttcaagcttgtatttttccgacagcaaagcggaaacaacctccaactgcacccggcccaaaaaagaaagaatgatctcatgggtgatggaatccacctcgcagcgcaaaagcgggtcagtatccgcaagttgcgtaagagcgtccagcagccgttctctttgcgctgccgttttcggcgcaatcgacgtccgcagcatggggagggggtcctcacgccaccttttacgagggagccgggttgggtcccctaatacatcgtttaacctcacgctgtcgctgggaaggataacaatttcacccggataagcggtgtctgtccgaacaatttcccctttggatggaatacgcatctctgtgattttcagcttttctctcccggccagggccaccgtatcccgcaggcgcagcgttccgctgtatagccgtagatagacacgccgctggccgcaatctgtatactccaccttgaaaacgctgccgcatagggcggcgctcccctgttccccaatcggttggaacagccctgtcaccgcatccatcaacggttgaatgccaaggccctttttggcgctgccataatagaccgggaacagggaggcgtcttgaacccgccgctgttcctcccgcacaagtttttcccggctgattggttctcctgcgatatacttttccaataatttatcgttattttcgatgaccgcatcccatgcttctatgtcggtattttcctccaggactatttccggggacagcgacaccgtctgcttgatgataatatcggcggagagcttatcccgaacagactgaaccacgctctgcaaatcaacgccagcctggtcgatcttgttgataaagataacggtgggaatgttcattttccgcagggcatggaacagaatacgggtctgggcctgcacgccatctttagcggagatcaccaagatggccccatctaaaacagccaaagagcggtacacctccgccaaaaaatccatgtggccgggcgtatccacaatgttgactttacatctgtgccactggaaggaagtgactgccgcttgaatggtaatcccacgctgccgctccaaaaacatggtgtccgtcctcgttgtccctttttcgacgctccccggttctgaaatggctccgctggcatatagcaggctctccgtcaaggtcgtctttccagcgtctacatgggcaagaattccaatattgattattttcatgtgattgtcctccctttactgccccgaagggcataaaaatccccagcagtaaaatacttttaccactggggatgataatttgcggacatacacatatacagcatacacctgtttgtgagtgctgtttttggggatatgtcaaaattgataaggcaaaagtattcttaaattgggtacaaaaaactaagcccctacaaaagggactatcataatcctttgttcccactatttgattatagttttatttaagaataccttgccgcatattttttactccttttctggaattgaattattatatcattattatatcacatcagttttaggaaaacaagtatctaaaagaaatttttcttccccttatatgtaacaatcataccggcttcctaacgttcagaatggtttctactgtctgctgcggtgtttggttggaattgtccagccaaaagccgatccgtggtgttgtctgcattttactaaatacaaattcaatgtatacagaaagaaatatataaggagtgggagggattccgccgtagtcggcattgtaggaaaatccaaaagtttagattttctcaaaatgcttatcttttggtctttggttcggaatagtgtagtgctggcggtctatctattgttttcggttgcttgcttctttaccgtacatgagcatcatcacatcattaataacagtcacgccgacagaccatgcgatacaaaggtgccgcgaaataaaaactcctgcatgccacggggagcaaggaccgggagacggatgaaaaggggacgcgagcggataaaaaaatgggggttcccggagcgtgacgctcgacgggaaccccgacgttgaatgcggcggcgtgctactctcccacaccctctcgagtgcagtaccatcgccgcagccaggccttagcttccgggttcggaaagggaccgggcgtctcacctgggccatgaccaccgcaaaaccagtacaacagccaaccggaagaaccggcggccggcaacggaaccaaccacgattccgatcgtggcggtccgggaaccggacaacggacgcgaacaaaacgcttcgatccttcgtctcgtgaccacaagaaacagcattccttgccatccaacgagaaaccaccacaggacgagacccaacccaccacaaaggaaagggtcggaaaatgtgccgcgatcgcccgttagtaccggtcggctccacccctcacagggcttccacctccggcctatcaaacacgtgttccacatgcgggctacaggcaccgaaagtgccaaggaatcctaatcttggagcaggcttcccgcttagatgctttcagcggttatccctcccgaacgtagccaaccggccatgccgctggcgcgacaaccggcataccagaggtccgtccacccaggtcctctcgtactatgggcaggcctcctcaggattccaacgagcgcagaggatagagaccaaactgtctcacgacgttctgaacccagctcgcgtgccgctttaatcggcgaacagccgaacccttgggacctgctccagccccaggatgcgacgagccgacatcgaggtgccaaaccatcccgtcgatatggactcttgggaatgatcagcctgttatccccggggtaccttttatccgttgagcgatgccgcgcccgtgcgccggcaccggatcactatctccgactttcgtccctgcccgaaccgtcgttctcgcagtcaagcccgcttgtgcgattacactcgaaacccgattgccaaccgggctgagcggacctttgagcgcctccgttactctttgggaggcaaccgccccagttaaactacccgccaggcactgtccctgaccaggatcactggccgaggttagacgtcaaacgagaacagagcggtatttcaccttgcggctccacacgggctggcgcccatgcttcgaagcctcccgcctatgctacacaatccgcgcctaacgccaataccaaggtatagtaaaggtcccggggtcttttcgtccttctgcgcttaacgagcatctttactcgtactgcaatttcgccgagctcctggtcgagacagtggggaagtcgttacgccattcgtgcaggtcggaacttacccgacaaggaatttcgctaccttaggatggttatagttaccaccgccgtttaccggggcttgaattcaccgcttcacccgaaaaggggctgacggatcctcttaaccttccggcaccgggcaggcgtcagtgcatatacagcggcttgcgccttcgcatgcacctgtgtttttggtaaacagtcgctaccccctggtctgtgccaccccccaacgctccgagggcaagcctcttcacgcccgggggtctcccttataccgaaggcacgggagtgatttgccgagttccttgaccaggattcgctcgatcgccttggtattctctacctgaccaccagtgtcggtttggggtacgggcggcaacgcccctcgcgccgaggcttttctcgacggcctggaccaccggatatcgcgcccaaaagacgcccatcatcacacctcaccctacatgccccacggatttgcctatgggacgggctgcgtgcttgaccacggaaaaccacctccgcggccggctcccattccgtgtcacccctgtgcgctaacctaccaggactacgctcccaacaaccgcggaccccgaaccccgaagggaacgacgccacgcgaccggaggttagtactcatccgttcggctcttacggtacgccgccggtacgggaatatccacccgttcatccattcgactacgcctgtcggcctcgccttaggacccgactcacccggggacgacgaacgtggccccggaacccttggtcatccagcggacgggatcctcacccgtctctcgctactcatgtctgcattctcactcccgcgcggtccacggcacgtttccacggccgcttcgccccacgcgggacgctctcctacccagcagccgcaaaggctgctgccgcgtcttcggtggtgtgcttgagccccgctacattgtcggcgcggaaccactagaccagtgagctgttacgcactctttcaaggatggctgcttctgagccaacctcctggctgtctatgcgactccacatcctttcccacttagcacacgcttcgggaccttagacgacgatctgggctgtctccctctcgacgacggagcttatcccccgccgactcactgccggaatacacatccacggtattcggagtttggctgctattggtacccgacacgggcccgcaagcatccagtagctctacccccgcgatgcaatcaaccgacgctgcacctaaatgcatttcggagagaaccagctatcacggaatttgattggcctttcacccctagccccaggtcatccccccggttttcaacccaggtgggttcggtcctccacgcggtcttacccgcgcttcaacctgcccagggctagatcatcccgcttcgggtccagggcgcgcgactcaaaacgccttttgagactcgccttcgctacggctcccccaccacgggttagcctcgccacgcaccactgactcgcagactcatttttcgataggcacgccgtcaccccacaacggaggctccgacggattgtaggcgcacggtttcaggaactctttcactcccctcccggggtgcttttcacctttccctcacggtactggtacgctatcggtcagacaggtatgcttagacttaccccacggtcggggccgattcacacgggattccacgaggcccgcgctacttgggacgcatgatcggaagacggcaagcttccaggtacggggctggcaccctctgcggccaggccttcaagcctgttcccctggcaagccgttttatgactcccgcccggtccgtcggaaccgggacacacgctccctcaacaccacggacgcaacccccgacgggtatcacgcgcccatggtttggtctgatccgctttcgctcgccactactcacggagtatcccttcctgcaggtactgagatgtttcacttccctgcgtacccccggaacaacaacgttccgtgccggcccatgacggccggcgggttgccccattcggaaatcctcggatcgaagccatgttggaggctccccgaggcttatcgcatcctcaaacgtccttcatcggtactgtctgccaaggcatccaccatacgcccttcagggcggcacacgccccgaaaaacccaatgatagcttcaaacgccagacgacaaatcatcacactgtaaaaaatgatcacaaaacgatcgatctcgaaaccagactcatccaaaaaagaagagcctggcgaaatcgcgataaagcaaacgatgacaacatcatcgcattgctcgcgtccactatccagttctcaaaccaccacgcgccccgaccggacccggcccgcggcccgcaaggccgacggcgtcccgccaggggcatccggaaaaccgcacgcgaccaaacgtcgcgggtggcggtccgggaacccaaaagcatatccgcaccactccccgccggccccaagggaaccagcgaagcccatgatctcttccacaccagcacgcccacgccagaccggagacgatccccggcgcatgggccacacgacggacgacaaaccatcgtcctgaaaactccgtagaaaggaggtgatccagccgcaccttccggtacggctaccttgttacgacttagtcccaatcacgagtctcaccttagacggctccatccacaaaaggttaggccaccggcttcgggtgctacccactttcatgacttgacgggcggtgtgtacaaggcccgggaacgcattcaccgcggcgttgctgatccgcgattactagcgactccgccttcatggagtcgggttgcagactccaatccgaactgagaccggttttcagggatccgctccacgtcgccgtgtcgcatcccgttgtaccggccattgtagcatgcgtgaagccctggacgtaaggggcatgatgatctgacgtcatccccaccttcctccgagttgaccccggcggtcccccgtgagttcccaccatgacgtgctggcaacacagggcgagggttgcgctcgttgcgggacttaacccaacatctcacgacacgagctgacgacgaccatgcaccacctgtgaacccgccccgaagggaagccccatctctggagcggtcgggaacatgtcaagcccaggtaaggttcttcgcgttgcatcgaattaatccgcatgctccgccgcttgtgcgggcccccgtcaatttctttgagttttagccttgcggccgtactccccaggcgggatgcttaacgcgttagctccgacacggaacccgtggaacgggccccacatccagcatccaccgtttacggcgtggactaccagggtatctaatcctgttcgctccccacgctttcgctcctcagcgtcagtaacggcccagagacctgccttcgccattggtgttcttcccgatatctacacattccaccgttacaccgggaattccagtctcccctaccgcactccagcccgcccgtacccggcgcagatccaccgttaagcgatggactttcacaccggacgcgacgaaccgcctacgagccctttacgcccaataattccggataacgcttgcaccctacgtattaccgcggctgctggcacgtagttagccggtgcttattcgaaaggtacactcacccgaaggcttgctcccgatcaaaagcggtttacaacccgaaggccgtcatcccgcacgcggcgtcgctgcatcaggcttgcgcccattgtgcaatattccccactgctgcctcccgtaggagtctgggccgtatctcagtcccaatgtggccggtcgccctctcaggccggctacccgtcgtaggctcggtgggccgttaccccgccgactacctgataggacgcgaccccatcccataccgatgaaatctttcccgacaccccatgcgaggagtcggagcatccggcattaccacccgtttccaggagctattccggtgtatggggcaggtcggtcacgcattactcacccgttcgccactctcaccaccaagcaaagcctgatggatcccgttcgacttgcatgtgttaagcacgccgccagcgttcatcctgagccagaatcgaaccctccacaaaaaaactttgcagaaagccaacatgtgactctcaaaaacaagaaaattgacgatcgccttataaggaaaggcgcatcgcacgaaaacctcaccgtccttcaaggcctcccggccactcgcgaacgagcggacgatgaactggcaatcattgactataaagaagtagtacaaatacgctcttgagttctcaaaccaccaccgctcacccgcctcagggaaccccaaccggggaaccactcgccgagcggcagcaagagataaacctacagcacaatcccattccacgcaaatcgggcatgacgaaacaagacgcgaacccttgcaaacactggaaagcgccggcgtgtcgaaatccgtctttcttacaccataaatcgcaaaaccaactccagcacaacccaaaaatcgtcagaaaaagctgattgccgcgtgtcacacaacgcaacaacacggcaatcagcagatcaacagcgcatcacagcaagtcacagacgatcggaaagccaatcgaacaccaaacgcaatgcgcgagcgctacggaatccgtaacaggcatggcaggcgttatcgagcttgtagaacgtcacatccttgccaagcgctttcaacgtggcatacaggcgacaactctgattgaacggcaccaactgatcgcggccaccatgcatgatcagcgttgacggagtgggcatatcggcactcagataagtcataggcgaagccggggcgctcaaatccggatgttcaagcacgtcaccgccatcaatcaccacaccttccgggcactgcggatcactgtggttctgcgaactcggataaaagttcatcttcgcgaaatcagtagggccatgccaatccacgatcgcgttcacttcgacgctttcctcggcataggcatccgtatcaggcgcgcgattgccagtgaacccagccatcaacaccgtatgaccgcccgaagaatcgccccacagcgcaatacgatccttgttgcaatggaagcgttcggcattcttgcgcatgaaacgcaccgcagtcttgcaatcctgcatctgcgcggggaacggcgcaatatcgctgtgacgatacttcagcgcagccaccacatacccctgctcggcaatacgcacgaaataattcgagcaatcggtcacattctgctcgtggaatgccgaaccgcgcacaaacacaatcactggccaaccaccttccggcattgcgccctcgggcatattgtcaacgccaggcgtgaacacccacatcggcaaatcaacactgctgtcatcagccagctgacgggtcacgtatgtaacctgctcgatattcacgggatatccgaaatcatcctggtccaagtcggaaatcacttggcagccttccggaaactcatcagtgtgcgggaagaacttagtctgctcgcggcgtcggaatcggggcaagctgtgtcggcgacggcggcgccaccatcgattcgatatcgattgccccgatcgccgtaaccgtctcggtcgtttcggcagtctcggccgcatcagcgccatcatctgcaatgttttgtgcaatatcagtagtcataatgcacctctcattcctttccatgcatgattattaagattgcttttctcgaatttgattgcccgatgttccctgtttcacgtgaaacatcagaagttacgtcgtgcggctatacctaagatatgagcaaaaagatcgcagtattgacgggggcggggatttccacgtccgcaggtattcccgacttccgtggaccggatggcgtctggactaagcaccctgaacaaacgcaagtgtatgacatcgaagcattcctttgccacgaggaagatcgcaagtattcctggcgttggcagaaggaatcacccgtgtggaccgcacagccgggcaccgcacataaagcgctcgtcaaactggaacaggctggcatgctgacgctgctcgccacacaaaacttcgacgcattgcatgaaaaagccggcaatagcagcgacgtcatcgtcaatctgcatggcaccatcggtacctcgcactgcatgaagtgccatgcaaaatatgacaccgccgacatcatggcgaatctcgacaacgaacccgatccgcactgccatcgcagactgccctacagcggcaacatgccatgcaacggactcatcaaaaccgacgtggtctacttcggcgaggcgctgccggacggcgcgctcgaaaaatcgtatcgactcgcaacgcaggccgacgaactgtgggtcatcggatccacgctggaagtcatgcccgcggcaagcatcgtgcccatagccgcagaggcgggcgtgccgatcaccattatgaacatgggacgcacgcaatacgatcggttggccgaccggcttatccacgacgatatcgccgtcgccctgccgcagctcgtcgacgaaaccatcaccgccgagcagtaagccgcacagtaaatacgttttctcgtacgtcttgcagtaccggcacaaatcgttggaattacaccggttttggttggtcgttaccaaaatccgaatttttcaacgacaaaaatccgaatgacgtaacggctagtcaagcaatataaacaacaaaagggtcttggattgctttgcgacaatcagaaatcatcgcaaggctttccaagacccttattggttatcaaatactgaaaaacggtactgaaatcagtaaatgcgcttcggctggaaaccggcttcccgcaatgcctcgagcacacgatcaatgtggtcgggaccattcgtttcaaccgtcacgcccaaagccacggcattcgcgtaatggctggacgccttgaactggtcgtgatccagcgcgataacgttcgcacgctgctcggccagcaatgtggcgaccttcaccagctgtcccggggtatcgggcagctcgacctcgaaatgcatgatgcggccacgcgtgatcatacccttctgaatcacagcgccaatggacacagtgtcttcattaccgccagacatgatcggcaccaccacatgcggacccttcgcctcagcgaacttgcgcgagcgcaggttgaggtgctcgagcgcagccagagacacagcgccggcagcctcaaccaccagcttgtgcttttcgagcatgagcaggatcatctcgttgatgtcacgctcggtcacggtgacgatgtcgtcaaggaattcgttgagcagcgcgaacgtgagatcgcccggacgcttcacggcgacgccctcggcggacgtgcgcacctggtcggcggcaaccacatgacctgcggccagcgaattcttccatgctgggctaccctccggaatcgcgccgatcacgcgcacttccggcttgaacgtcttgatggcgagcgccacaccggcaccaagaccgccaccgcccagcggtacgaccacgtcggtgacgttcggcacgtcttcgaggatttcaaggccgatggtgccctgaccgcacagcacctcgtaatcgtcgaatggcggcacgtagatcatgccttcggtgtcgctcaattcctgggcgcgggctgcggattcgtcgaacacctcgccgtacagcaccacgtctgcaccgtacgccttggtggcgtcaaccttcagcggcggagtgatctgcggcatgcagatcgttgccttcgcaccacgttcgcgagccgcataggccacgccctgcgcatggttgcccgcggaagcggtgacaatgccgcgagccagctgctcatcactcagggatgcgatcttgttgtaggcgccgcgaatcttgaacgatccggtgacctggagattctcaggcttgagcagaatctcatgtccggtcatgtcggacagcaccttggacggaatgatttccgtgtggcgcgcagtgcccttgagtcgttcggcggctagtttcagttcagctgcgtgatcgcgctgcaatgctttgagaacctcgttttgttccatgagcgttattgtaagcgtacgtctgccgaaactgccttatcatgcggctttcgcgatgaaaagtgagattgcttgcgaaaagtaatcacaagcaatcaggaataatcgcaatacataatctgataaatcacaatacaaataaagaaaaagcgttcgtacgatcccgtgatgaatcgcacgaacgctttttgcagagagtttataggaaagatcgatcagagctgaatcacgaccccctcccagcgagcgagctcgccgcgagcgaccgactttacgctatgcacagcatcataggtgctgagcagtacctgcgactcgcccacgccatcctcaagcagttgcgcgacctcagcaggcacctgcgccgtcctatcagtgagattgacgatgacgagaatcgtgtcgtcgccgctggtacgggtgaaggaatacacctgctcgctgtctgccgcgaccagattccattcgcccgtcgcgatggtcgcgttgttgtggcgcatggcgatgagcttcttgtagaagctgtacacggatccgggatcgtcgaattcctcggctgcgttgatctcgacatgattcggattgacgccgatccacggttccgtcgccgcgtccggcgcggtgaaacctgcatacctggaggcatcccactgcatcggcgtgcgcgaattgtcgcggccgatgagcgcgagcgccgccatcatcgattctgcggactggcattttgcttcttccacgcgctggcggtaggcgttgatggattccagatcgcggtactgctcgagcgtggtgaagtgtgcgttggtcatgcccagctcttcgccctcgtaaatgtaaggggtgccgcggtgcatgtgcagcagcatgccgaacgccttggcgctcagctcgcgcgactcacggtccgtgtcattgccccaacgggagacgacgcgcggctgatcatggttgcagaagaacaggctggcccagccggcgttcttcacagcctcctgctggtcggcgaggcgggcgcgcagattcttgacttcgaacggcacggtgttccacttggaaccttcctggtcgatgcccacgtggtcgaacaggaacagcatgtcaagttcgccgttcttcggatcggtgacatgctcgttgcgtgccggagtgatgcccggcgcttcgccgacgttcatgtagccttcgcggccttcgaacacttcgcggcgcatttcggcaaggaactcgtcgatgcgcggaccgtcggagcaccatgggaacgggctggaatagccttcctcaccaaccggataatcctcaatctcgcagccgtcttctcccggcagcttgccgttcttatcaacagtcttcgaaacctgcgtgatcacatccatacggaagccgtcaatgccgcgatccatccaccaattcatcatcttgtagacggccttgcgcacttccggattctcccaattcaaatccggctgcttcttggaatactggtggaagaaatactcgccgcgcttcggatcgtactcccaagcggaaccgccgaaataggaaccccactggttcggctcggcacccggagtgcccggctcatgccccggcctggctggacgccaccaataccagtcggcatgcggatcgtccttgtcgcgggaagcctggaaccaagcatgctcgtcggacgtgtggttgaccaccaaatccatcacgatcttcagaccgcgcttgtgcgcttcggcaagcagctcgtccatatcctccaaggtgccgaacagcggatcgatatcctgataatcggaaatatcgtagccgttgtcgtcctgcggcgacttgtagaccgggctcaaccacaccacgtccacgccaagatcggccagatagtcaagacggctggtgatgcccttcagatcgccgatgccgtcgccgttcgtgtcttggaaggaacgaggatacacctgatacaccaccgcgttggcccaccacgggttcggggtcgcgccgttggaacgcacggtgtcgggaagggtggaacgattgaaattcgtcatgtcgtggagctcctttgcttgacgtttgttggattttcgttcgatctttcgtgactgactctgcccgttttcagctcatgtcagcttcatgcagaagatcgattttgcctactcccctatggtatgcaaccctgtttttctttctttcccgcggcgagttgtgcaaagcaagaaaagaatacgcttcttacggacgcgaaaaaccaatccgcaaaaataaaaacgcgggacgttccagaaagggaaatggaacgtcccgcgctggggagtgggataggccagtcccgctcggtgctgtgaagtgttacttcctgaacggacggcctacggccgcgttgtccctgccttcactcgcctatcggctcgctcagggagagcctatgaacagaccactgggctgctcacttaacggctcccctcatcactccaccgacgacccacttctgggcgaagatgtagacgatgaggaccggagccatggccatcaggtaggacgcgaaggccatcggatagttcgacgtgaactggctttggaacacgtactgtgcgagcggaatcgtctgattgctctgatcggtcagcgtgatcaacggcagcaggaagtcgttccaagcccacagtgcggtcaaaatcgcaatcgtggcattaatcggacccatcagcgggaaaatgatcgtccagaaaatacgccaggtggaagcaccgtcgatacgagccgcctcttccaacgaaatcggaatcgaacgaatgaaaccaatcgcaataaacagattcgtaccaataccgagaatcgtgtacaaaataatcaaaccaagctgattatcaagatgcagcgaacccatttccttcgcaatcggaagcatgatcaccgtgaacggcacgaacatcatcgcaaggaagaagtagtacaggaaacggaagaatcgcttatccatattccttgccacagcatacgcgacgaacgtgttcgtcagcagcgtcaacaccaccgcgcacacggtgatgattgcggaattaagcgcggccttcggatagttcaccttattccacgcatcggcgaaattatgccattcccatgtggtcggcaagctgaacgtaccagcctcgctcggagtcttcaacgcggtgaccacagcgaaatacaacggcacgagcacggtaaggctcaacacggccacagccgcggtcagccaccagttgaccttatgatccctgcggattttctccggctttgcctgcgattgagtagtcttggctgcagtctttgcaacagttgcgctagtcatgatatttcctctttaccttcagactttcagacccttgctcagaccttctccttgccgctgaagaacttcagctgcacgaaggccaggattgccagcacgatgaagaacgtgaccgcgttcgccatctggtaggagtattcgccattgccaaggccgttctggaagatcagatacgagacggtttcggtcttggaatccgggccgcccttggtcaatgccatgatctggtcgaacgcgccgagcgaattcttgaggctcaacaccatgttgatggtgaagaacgggccgatcagcgggaaggtgatctgccagaagttctgccaagcgctcacgccatcgatcgcagccgcctcataaatctcgttgtcgatggtctgtagtccagccaaatacagcagcgtggagtaggccacgccctgccagattgacaggaacacaatcgggaaccatgccaaatccggattggaaatcattgacgtcgacagccaatcaatatgcagcgcctgaccgagcgccggcagcggcgtcatgaaaatgtacttgaacacatagccgatcaccaacaccgacaaggtgtacggaatgaagaagatcgcacggaatccgtttttgaacgcgattttcgaattcagcagcaccgcaaggaacatgccaagaaaattcgtgccgatcgtaatcaaaattgcgatgagaatagtgaacaggtacgcgtgaccgacgcgagaatcctggaacatcgcaatataattcttcaatccgatgaatttgaaatcaccataaccctgcgaattggtgaacgagtatgccgcgccctgcaggaacggccaatacaggaagatggacaccagaatcacagccggaacggtcatccaataaaatgccggatcgaccttgcgcttggaatatttcgaaaccttattcttggaattttctgccgagttcttcgcagtatttgcagtatgtgcggtagtcatgtccgttcctcctctcacctgaagtttctggcttcgatcttgtcatattcggattgcacgctgttcaggaatttttcggtgttgcccgactgaaccagcgtctgcaggaagcctgcgaggttgatgctggctggcacgtaatggtcgcagaagtcggccagtttgcccgcctggtagaagtcaagcacaccgttcagcgcttcatcgcccacatacgtgtctttgtagggggtaaatgcggactgctgcttggagtagtccttgatgttttcgtcgttcatcaggaagtcgatgaattcgcgcgcttccttctcatgcttggtgtgtgctcccatggtgagaatcacgtcatcgcctgcggtgagttgctgttcgctggcatcgtcggttgccggcatttgcgcgaaacgcaagttggcatcgctgttgatgagtcggatctgcggaatcgcgtaggtgccgagtggcagaatcgcggctttgcctgcggccagatcctgcgtggcctgctggtaagtgacggccggattcttctgcgtgtagttctggtagatctcgaccagctgatcgctgacagtgccccacaggtcggagaatttcttcgatccgtctttgagggaaagatattcggattccggcaccagcgtggagttgagtgacgccagcggcgcctggagtgtccacggatcggcggtgctcgcttcgatcggtacaatgcccttgctcttgaagcgttgcagcaggtcgatgaattcgctccacgtctgcggtggattgtcgggatcctcgcccgcttcctcccacacgtcggcgttgatgatgtagccggacgcgttgcccgcatacggcaggccgtacaggcgcttcttggattcgtcgttggtttgtacaaggctcttggcgatgttcaccatgcctggattgagttcgtcgacgatgtcatcgtcggtgaaatcgtggaaaacacccgcttcggcgagcatgccgaaattaatgtcgccattgatggtgatgacgtcgggttcacgatttttcaccagtcgcgtacgcaaatcagtggttgcgtcggacgaattgttgacgttgactttgatgttgggatgggttttctcaaattcctttgcttttgcggtgaaccagtccgctgcttcggctttgaattggaagaaatccaaagtgacggttccagcggtgctgttgccgcaacctgcaaggccggccgtcaacgcgattgcgcatgcggccgtaagagcgcggtatacaatcctcctgaatttacctacactagtggtggaatcaggtttcattctcgactcctttgtatcttttctctattacggtggagcggcttccttaccacaccaccgttactgagaattgtagaagggggcggttttcattcccagctcagcgcgcctgtgcggggcggaaaacaaaaacgacgagattttgttactctgagaaagtaatttgacgcacgatgtgcgcgaacgggagcacgaaggatggttcagatggcggtttcacctctgccacagtggtttgaaggctcggaatatacccataaagtcgcggcttgcatcatgaaatatggtccgatttcacgcattacgttggcgcagattttaggactttcgcagggtgctgtttcccgaattaccagcgatctgatttatgcaggcgtgattgaggagacgccgatgccatccggcaaggccggcaaactgccgaaagatttcgtgcagaaagaaaatacggaacgtcgtggccgcccgcaaaccggattgcaggtgattgcgaatgcgcgatctttcgttggcatgaaaatcaacgcgacgcatatttcggcagttgcggtcaacgcaatcgggcagatcatcactggatgccatgatctggaaatcgaagacgcttccccgcagaccgtggtcgcgctgatcaaacaactgacgaccgactgttccgacgaggcggagatggcgggctggccgaaaccgtgcgctgtgggaatctcgcttggcgggcatattgtcgacggtaccgtggtgacgttcgcaccgttcatgcactggtcgcagcccgtggagctttccgtcatggttcgtgaggcgaccggattgcctaccggaatttacaacgatatcgattcgttggtcgttgatgcttgcctgtttgggtccggtattggattgaatagcttcgcggtgctgacgttcggcgcgggcgttggctattcgttgacggtcaacggcgagctggtgaactgtccggataaaagttacggtttggtcgggcacattctggtcgatccggatgggccgcgttgtgtttccggacataagggatgcgcgcaatgtttgtccgacaactcgatcgcggctgaatattcgcagattatcggacatcccgcatcattcgacgatttcgcacgtgacgcacgcgcgaacaaaccgcaggcgacgaatctggtgaaccgcgtctgcttccgtctcggcaccctggtggcgaccatcgccaatcttgccatgccagacaaaatcatgatcgctggagaatcgtctttcatcgcaaaattcggtattgacgacttgcgcaacggcatcaacatgtatcggcatagccaggccgcgccagtggattttgaaattcccgaccacgattgggctttgtgggccaaggctgccgcagcgcaggcaattcgccagtatgttggctgattaattgcgattgattgtttcgcataacaaaaatcctccctttgttctagggaggatttttgttatgcgattacggcttattcagcgctctcgacgggcgcaagcacggccttgaaaaggactgcttgccgagccgttaagcgggaagcccagtgggcttcccgtaggtgaggggagagagcgcgctattcagcgctctcgacgggcgcaagcacggccttgaaaaggactgcttgcgccgggtgcagtgccggcgggcggatgccgtacgtggcgagcgcgcgtccggtcatcctcacgccttcggccttccaccagccgagcgggctctgtccgttggcgatgtcttgcttggcgaggtcgaggctcacgtcgagcggcgacacctcatacaccttgtcagggtcgagtccgggcaggcgtaccggcgcggccgggtaggtctgcgaggtggtgagctgggtgaaacggtagatggcggccgcttggttaggcatgaccacaccgtccaagcgcactgccggatcggctgcgtcggaatgcacgactgtgtctacggcgaaccattcgcgatgcttcttgaattcggcgacccattcggcgagcttgtcgatatcttcctgcggttccttgagcaggttccattcgatgcccatgtgtccgaagaaggccatggccatacgcagttcctgcgtggtggcgcggtgcgtggagtgcgccggggatgcgcccacatgttcgccgatcatttccggcggcacgagcaacgaggtgtagcgctggatgtcggcgcgttccaccgggtcgacgcagtcggatccccaaatgcggtcggccacttcgaggatgccgaggtccacgcggccaccgccggaagagcagctttcgatttcaagtcccgggtgtgcggccttcagatcaatgaaaatgcgatatacggcgagcgtctgctggtgcactgccgggcgtccggtgcgcggggagacggcttcggtgacgagcttgttgtgatcccacttgatgtagtcgatgccgagttcgccgacgagcttgtccattgcgccgtaaatgtagtcgtaggcgtccggattggtcaggtccacgacctgctgggtacgtccttgcatgggcagacggccttcggtgggcttcagcacccagtcggggtgcgcgcggaacaggtcggaatcagggttgaccatttccggttcgaaccacagaccgaattcgagtcccttgccgtgcacgtaatcggcaagcgccttgagcgacttgtcgccgtcgggccacacgtcctgcgaaatctgccaatcgccgaggccggaggtgtcgtcgcggcgggagccgaaccagccgtcgtccaccacgaaacgttccacgccactttccacggccttgtcggcgagtgcggtgagggtgtcataatcgtggtcgaagtagacggcttcccacgtgttgagaatgaccgggcgcggcttgggtgcgatgttgtgttcagcaagccagtcgcggtgcacgcggcgaatgtagctgtggaagcgggctgcgacttcgttgaggccttcgccgtaggagccgatgagccatggggtggtgtaggactctgaattggcgaggctgatttcgccgccgaacagtacttcgccgccgccgatcacgccgctggtgtagggcaggcgttccgcggagagcacgctgttgccgctccatgccacgtgtgcggagtagacgttgccgtgcgtgaagccgaagcctttttcgccgacgctgagcagcagggtggcatcgaagtctggacgtccggccatggatgctttggcgaagcggccgagggtgaagtcctggcgctgcggggagcgttcgcgcagatggtggccggtggtggtgaggatttcgttggcgtcggccggcacggtgaatgcgagttcgatcttgccgacttcgagctggccttcgccggtgttcacgacttcggcgttctggcggatgaggccggtttcgtcgagttcgcaggtccagatgagtttcacatgctgttccgcgtcttcggcggtgacggtgacggttggggtttgcttgggttcgtcggccacgctccaattcgggtatccgtctttttcgcccatgacgtaggtcttgccagccgccacggtttcggcggtgatgttgctgactgcgaacttgcagaacagttccacgccgtcacgacgcacatcgaaacgggttgcgccgatccaggattcggattgcgtgggcagcacgctcggccatgaggtgtagtcgagtgcgccggaaacacgctgtggcatttgcgcgtcgaacatgtcgatcacggttgccggtgctgcgagcgggcgaccccaatgcacgagtcgcggcagatcattgccggggaatacgagtgcgaacgccacgtttgcggctggctgttcggcgtagaccgcagtgagttcggtaccgttggtagcgttgccatggaaggtctgaatgagcgtcattgcagcatcctttacatattgcgattgccttgtactgtcatcttcgatggtatgacaagcttcatttgttgacgtcgccgagcgtgtttctttctgtcggaaagtatttcttgcgaccatagaatcgcaagaaatattattacgtaaacattaccgttgaaatcgcaatcatctttaccaagatttacttggtatttcgatatttcttacgtttttgcgactgcaaaatcgcaattatcgttttccagcgaaaaaatcagtcatcaatcgtgcgcattccgattcacgaacgccaccgataacttccggaacatgaccgacatgcgggtcgcgaggaatgtcccaaatcgaaccgcatgcacccaacttggcatcccacgcgccgaacacgattcgaccaacatgcgtttgcaggcacgcgccggcgcacatcgggcacggctccaaggtaacaatcaacgtgcaatcggcaagattccacgtaccaagcgaccgagcggcctgcgtcatggccttgacctcggcgtgcgccaacggatcggcgtgcgcctcgcgcagattacggccactgccaatcaccgctcccccagcgtcaagcacgacggcaccgaccggcacctcgccttccgcggcggcctcgcgggccaattcaatcgccagctccatgtcgtcactccactgcatacccgccactatacggttccgctcgcgtgaagcaaaagacgaaacacgcccataaatacctcttggtaggctggaagagattgaagaaaacgcgcaaaaaggaggcacgttggcggtattcgagttgattttatgtattatcgccgccgtcgtactatcttcattcctcagccgtttcattcccaaggtttccacaccgctcgtgcagatcgcgttgggtgcgctggcgtcgcaattgccgtttttcccgaacgtcacgctcgatccggaactgttcatggtgctgttcatcgcgccgctgctgtatttggaagcgcatgaaatcgataaaagcgagctgctgaaatccgttaaattgtcgctttcattggcaattggactagcgatcgcaaccatggtggccgttggtttcgcgctgcataccgtatggcccgcaattccccttgccgcagcactggcgctcggcgccgcacttggaccgaccgacgcggtcgccgtatcgtcgctcggcaaggaagccgcgcttacgcaacgtcaaaccagcgtgcttaaaggcgaatcgctattcaacgacgcgtccggcatcgtcggcttccagttcgcgatcgcggcggccgtcagtggcgtgtttaaagtgggcgattcggccgcacagttcgtgttctcattcttcggcggcgccattttcggcttggcagtaggcatggtcgccgacctgttatttgaatcgttgcgatctttcggctgggagacgaccacaagccgtattttgatggaattgttcctgccgttcattctgtatttgggtgcggaagcggtgcatgtttccggcattctttcagtggtggcggccggtttgatcatccgtttcgaccgcaccggcatcggcccgaatgtggctcgcaccaacattgtttcgtcaagcgtatggggggtattctcgttcacgctcaacggcacggtgttcattctgcttggcatgttgctgccgaatgcgatgagcgcaagctgggacgatccgcaagtcagcaattggctgctactggttgcgattcttacggtttccgcagtggtaatcatcatgcgattcctgtggatttcattgatgctacgtctcgcgcgagataccgtcaccggcaagcgacgcaagatgacggcgcaacgttggcgttcggccgcggtcatgacgttcggcgggccgaaaggcaccatcaccctgtcattgatgttcacgatcccgtacaccattacgggaggcgcgtggttccccatgcgtgacgaactgatcttcatcgcaggtggcgtgatcgtcgtaaccttgctgctcgccaacttcctgctgccgctgctggcgccgaatcgcaataaagacacttccgtggaaatgaccgaaatcaccatcgaagtgctgcgacggaccgtggaggaactgacgggacgagtcacacccgacaatcgtcgtgcggtgctgatgatcatcgactcgtatacgaaacgtatcacacgactgaagcagcgcatcggagaaatcgatccgcaagggtatatgcaactgcagatcgacgcgctcaactgggagaaggaatacgtcaaggcgcgactggcgaaagtcaaggcgatgccgaacgacgacaaggcagcgcacgatctggaaatcgaagcatgcgagcgcctgctcgaccagatcatgagctctctgcgccatatcgaaacggaacataattccggacgcaccatctggcgagtcaaaggccgcttcagggcgttgcagaggcgtttgggcacggtggtgaagcgtgtgaacagccgcattcgccgcactaccccgctgttcagcgacgacgagctgttcgcgcacacccgcgcggtgcaggtggatgccatcgaacatgtgatcgaccgcctgtatgaggagatgggccgcgacacgtacaatacggaacattgctcggcactgctgctggattaccgacgaggcgaggctacgctgaggtcgcgcccgaatgtgggcacgagcgcggaggcgcaggcgcaggcggaagatgtgaagcgcgaaagctacggtatcgagctgggtgtgatccaagacatgtacgaggcgggcgacattacgcgtgcgcaatccaagcagctgcgacgcaacgtgtatgtgatgagcgtggacgccgacgcgcagatctagcatccagctgatctgatgggatcagcaagctggcgtgagccggtgatccgcagcgagtttgtctgcggacgaactgtggaaacgtgggaaacgagacaactgtaggaacggaacacgcgtataacgtcgcaaaccgcgaggatattccacaatctaaaacatgggggggggtgaaattctcagaaatttcccagaaaacaccagacatgtactcagcatcgtctgcttatataggagatgtcagcaaaagagccgaccaggaacccacagcagttcccgacaattgaaccctttcttcttttctctccccggtggtcttctctccaccggggtttctttttgccctcagcagggtggattcctccagtcagtggaacaatctgcccgctggcaagtcgcccaacgtcccaaaacctccacccactggaacaatctgcccgctgacagcccactcaaagtccagattcccccagtcagtggaagaatccacccgctggcaagccatccagagtccagaaacccccaccaactggaacaatccacccgcttacaggccgctcggcgtcctaatccttccagtgactgggagaattaccccgctggaacaggtatattggaggcatgagtgaaatacgcgagcacgaaaccagcgattcccacgactccagcaacccaaacaccccgaccggtctgatcgggcgcgaatcgcaggtggttccagggaggttcggcgagccgctgcaggtcacgcacgtacagtattcgcgcgggggcggcaatgcggctccacgacgcccgctgttcctctgcctgcacggctggggctccaatgaggccgatttggccgacatgatgcgttacgtggctccctacaacgattttgcttcattgcgtgcgccgctcgtgctgcaggaggctggttccggtgaattcggtttcggtcagggcgcgtattcgtggttccatgattgcgtgccgtccggcaaagacctggatcgagacgcttatgctgccgctcaggccattgacgattgggttgcgcgcaatgttcccgaagatcgcgctgtagtgccgatcggtttctcgcaaggcggtttgctggcgattcatctgctgcgtgtccatccggaacggtacaccgcgtcgatctcgctttccggcttccttgcgccgggaatcgtcaccgacagtgcacctgccgacagtcgtattgcggaattgaacattcccgtgttctacggttacggcaagaacgataccgtgattccgatgccggagcttttcgcaaccgccgcttggctggacgaacatacattccttacgtcgaaaagctatcgtggactcgatcatgcggtcagtctcaacgaattcagcgatttgcgcgactggcttgccacgcacgatatcgcgccgggaatcctgtaagaaatcctgcggaagaatcccgtagaaaaatcctgcagaaaaatccgatgcaacggattttgcgcaccaagcacacggcaatcgttacagcccgatataagccacgatatagcgataccgcgttagactagagccagctaataatcatttcgcaattgccggcattcgcacgctcaaccatgcgaacgttcgaatgttggcgagcgccataccggcacattcgcgtgcctggcaataaggagtttcgatgctgctgtccgatcgtgacattctcgccgcgcaggccgaaggtcatatttcactcgatccgtggaccccggaaatggtgcagcccgcttccattgacgtacgtttggaccgtttcttccgtctgttcaacaatcatgcgtacacgtatgtcgatccggctgagaatcagggcgagctgaccgagcagttcgaggtggctccgggcgaaccgtggattctgcatccgggtgagttcgcattgggttccacgtgggagtacgtgaagcttgatccgacgattgccgcccgcctggaaggcaagagctcactgggccgcttgggtattctcacgcattccaccgcaggcttcatcgaccctggtttcgagggtcatatcacgttggaattgtcgaatgtgtcgacgttgccggtgaagttgtggccgggcatgaagatcggtcagatgtgctttttccagctcagctcccccgcagaacatccgtacggttcgcaaggcaccggctcgcattatcagggtcagcgcggtccgacgccgagccgttcctacgtgaacttctacaaagccgacatcgccgactaatcatcaaatattcttggattatcgcaatatattgtcgatatatagcgattgatatcggtagcaggctgcggacgttttcttggagatgatcacgcagtcattccctggctctgacggtattataccggactcatccaaccgagtgaccgtttgatacgctcgtggttgcgccaggccgtaacggtccatgagatccagccatccgggccgccgacagtggcagccgcggtcggaatgcaccagggacctcgcccctccggcagcgtttccacggccttgacgagcatcctgttggctagctccgcgttgggaccggacccggccgtgtacgcgacgatcccgccatcgtggcagtcgaccggcggcgagaggtacacctcccgtcccgggccttgatcccgggtgatgtccgtcagccacttctcattcggccgttcggccgtgaagtcgcggtcggcgaggttgtcgggagccggcgtcgtctcgcccccgtatgagccgtacccacgtcgttcgggaacatgcaccgtcggaccgtcctcggccatgatcccgcggagcaccttctccgagacgccggtcctgagcatggccttgaccctgcggtacccgtacccgcccttggaagcggcgaacgccccggccacccggacacacggcccggcgtatctgtcaaccccgagcctggcgtggtggcagtaggcggctgcttggcgcgatgccgggcaagcatgtcatcgagctgagtgaacacgtcgggcgcagacggtcgaccggaagcgtcctctccctgttcgacaggcgccgcaggtcggcgcccgggtctttttctgcgaacctccaccacctcccgcatcaccgcgttccccagttccggctcctcgatccgccggcgcagggcctcggcgtcgccggcgtcccgatcccgtcgcatcgctggcttgctggtctggccggcgttcctgtttttgggccgcaacgcggccataccgacctcgcgatacgccttgacccagttgcggaccgcgccgagccgtccggcaccggttcgatcgccttggtcctcgtctccagtgggatgatgggtttcgccatatggccggcatacctggaatcctttgccagccagcgttccaggcactgcctggccggatagcccagatgcctcaccacccgggccgtggtcatcggcgtggcggaatacaagtccaccgcgcgccgccgttcctcaggaccgaacatacgataatcctttcgttcagtctccaagaaaacgtccgcagccccttatcagaaagagaaccacggagataattccttgcctgctaattaagccatgaagtgatgtcgggccacacgtacggaccatcacgattcaactggtataaatcttttcaacattctctcgagcattgcgaacaacacaaacaatatgattgcaatgccaagatagacgataagagcgtcggcgtagacctcactgtacttaaagctttctgatccaatgatggtcgcccgggccatgatgtccatcacggagatcgtatataacaatgaagtgttcttcagcatatcaatcaccgaattcgaaatgttcggcacagcgttaatcgcagcctgaggaatgattatacgagacactgcatgtacggcaggaaggttcagtgatttgattgactccctctggccctcaccaaccgtgaagtaagcgcttctgaaaatctcgcaaaaatacgcactggcatagagcgtgaacgtgacaatcgctacagtgttcggatagatggtcacgttactgacgaacttcggattttgatgaacgaaggccacgatacggggcattccataacagaccacatacagttgcacaagaatcggagtagaacggatcagagacacaagcaggccaacgatcgtattcagcaccgggatccgtcgcagacgaacgacacagaaaagcattccgccgaacaaacccaaaaaagcggaaaccactgtgaccagcactgcgactggtgccgcctgaagaatttcatagaaatgattaaaagcgtattgggaatcgaatgacatatcaagcaacctttttcaatgaagcgtcatagactactgaaatcaacttgtcgataagcgcggcaattacccagtaaatcagcataagagctaagtagatttccagttgccataggccaaagtcatccgcggaaagcgtgatcgccttctcataaatatccatgataccgatagtgaacaaaatcgaagattgcttaaccgcagtgattaacagattggcgaaattcggaagacaattaattagagcctgaggaatgacgatacgcctgtagtaggtcagtttcgacaaagagagggatttcgccgcttgcacttatccttctgatacagcatcgaagccagctctcatcatttcttcaaagaaagccgacagactcaaggcaaaggcaatcaaggcatataccaggggatcatccgaatcgacaccgataccaagggaagcaagaagcgcgggaagagcgtagtaggaaataaataacagcagaagcaatggcgtgccacgcatcaaccacacataacctgtgacgatcatttttatgagtcgattgcgggaacgcccaagacaggtgagcagaatcccgatgaacatacctagaaccacagattccagcactatgcctagcgtataaggcaaacgcgttagtagcggcgggaatgccgataagaatgccgatgcgttgaaataagtattcattctacttactcctcgccgtgatagcgacgcaggaattcctcggtacgctgttgttccggcctgttgaaaagcttctccggggtcccctgctccacaatggaaccgttttccatgaaaataacgttagaagagatacgtctggccaaagccatctcatgggttaccaccaacatggtacgcccctccgaggcgagctgctcaatcactttctccacttctccaacgagttccgggtctaaggcacttgtcggctcatcaagcagaagcaagtcaggattgaccgcaattgctcgggctatgcccacgcgttgcttctgccctcccgatagatccttgggatatgattgagccttatcagcaaggccgactttgtctaagagttcaaggccgagttgatatgcttcctttcgaggcattttctttgcataaatcaaagactcagtgacattctggatggctgtcagattcgcaaaaaggttataagactggaaaaccatagcagtcgcaccacgtacgaaagcaatgtctttacgatctctggtagcaaggtctatagtctttccagctaaagtgagtgttccggaatcggcggtttcaagaaaattcagacacctcagaagcgtggttttaccggagccactcggtccgataatagaaacaacctgtccctcattttggctgaatgaaactgattttaaaattgtattgccgttaaagcctttaaccagattcctgattcctattgacatatcatcctctgtttttgtttatgcaagattgcgaaattgccacatccatcactgcagttgatcgataacagctttgtcgaaggatggtccttcgaatggatcaccgaaataatctctataaatcgttagcagcgcttcgcaggttggcgtaggaacccccaatagattccccaatgcaacaagaggggcaataccatatgggatgtcttcttgaatgaaccgatgccgtatatctttgggaccaatcaatgaggaatagaccggattgtttttaaataattcagtcaatgtgaggtaatggcttccccaaaacccgttaagttgcgccgtgatgggtatgtacgggctttttaatgcgtttgcaagattgtgccgttccccatcaatatgcctgacaagttgctctgtacgttctgtgaatccgtcggacagcatgtaatactcagatccgctttcgattcgagtcatattcagaaggcaaagtggagcatggatgatgggattcggagccatcaaagaggtggcgaacaccatgtcatagttcagcacgttcgaataagcggatgacaaaaaacggttagttccctcatgagcgtccgaattaatcgcataggcgatctcgatagatgatttgagtcctttgaagagcagcgaagcactctgttccggtttttcgttatcgaacatgaactttgagacatacggcattcccgtggattcagcaatcgttaaccgttccttctggatgccatcttctccagccaatatctggaaagcctcatacgcgccccaattcccgttgaacacgataagacgaattgccgagccgggattattttttgcccagtctcgcacgttcttaaaaacatcattgtgattattagcccatgtgcagataataatgaagtcggcaccatccaaaacttcagccagattatcgctcgcatgaatcttccataatccatcaatcacgcctgtggaagatattgcagagccctgcaacgccgccagtttcgccgcattacgtgtatataccatcgggttatatccgagagagcttacatgcaaagccgccgcgatgccggtgtttccagcagacagaatagcgattttccccataacaccaccaaccacaaaatgaatttttaaaagacataaatctgccgtacggggaaaccgtacggcagaggcttcaatcgtcaatcacttccaatagataacgctatcgaccttgtctgcgcccggtagtttaaagacgtcttcgccataccacttctcggacagcttggacaaagtgccattattgcggaaatcatcgagaaccttgtccacatccttgcggagcttcgcagtgctatcgcccttatgatacaggaacaccgttgggaacaatccgatggaatccgtcgtagtcagatcaaggccgagttcatctttaatgctttggaaagacgtgtaagggtaaatcgccgcgtcatatttgccagcaccgacggctttaagcacatcagcgaccgtggcggattttctgtagcaccttcgaactcaattttgttgttaggatgcttttcattgtattgattaataagagtgtagcgtgcatcatccgtcggaatcggtgcaagtttcttaccggatttcgcaagatcctccagagaattaatgttcttctcatccgatcggataatcagtctggcatcactgagacccgtaagattttcggaataatcaaaagtcttaaaacgctcggcagtaccgtagaaagagcacgttgccgcatcatactcgccactctgcaatcccgtaagcaaagcatcctgagccagcgcggtatacttgaatttgtactggggcagtttttcatcaatcttcttcagaagttcgaaatcgtagccagtgtagttattgccgtcaacgaatgtatacggtttttccctgtcacaccggcaatattgacaacctgaacatctttcgatgcttctgtatcattcttagatgttccagagccgcaggccgtcaaggagaaaacggatgccgccgctgcgatcacggctacaatacgcttattgatgaggctgttagacatttattttcccttcctcttggcataactatccaactgatgagaagcatgctatctgaggaatgaacccaaaatgcctttcgcgctatcttatctttaatggagaaactataagcgtgatttataaacgccaacgagacaaacggtctcggacagatcagacgctaccgaagtaaataacgcaaatacccaatcagcagcctagaagcaaaagccaaaaagatgaatgaaagcaaacccatatccaacttaaatcgaggtgcgagcggattcccagactggcacggcggctccaatgacagacaacagaaatagcagcggaacaggtttctcatgagtgtgaagcccaatcggaattccagggactttgatgagaaatgtatggagccgaggcggatgattcaatgacggcaaggagagactgtttggggagtatcgacatgaatgacggtatcgtgcgtcgtccacggtacaggggatggacccgtgatcgctacgactgcagtcgggcttctccattccattcccatgagagggcgcacgccccaaagacgtgcgccctctcatgggaatggaatggagaatgaaatcaacggtcttctatctggacatgacccccgttctcgcaattgaccccagccagtccagggatggcttcggatgacgttcgaaggtgtccttgtcccaagaagccagaccgaacgtcggagcgaacgacccccactcgtagttgtcgagcaacgaccagtggaggtatcccctcacgtcgatgccgtcgtccatcgcgtcgcgcatgccggctatggcgtcgaaggtgtagtcgatcctccggcggtcgtccgcggtggcgatgccgttctcggtgacgattatcggcgtgtgcccggcgacgtcccatgtgtgccggatggcgatgcccaacgccggcgggaaatactcccagccggtgagggtgcgttccgcgtcctcggggaccggcactggcccttccttgccgataaaggtcctcagataggcctgcacgccgatgaagtcgtccccggccgcggcttcggtgaagtagtcctcgcgcggatactggtattcctccatctcccgttcgcatcccggcatggcatggaacgcctggcaggcgatggtccatccggacttgatccgagggttcccggacagtatttcccgagccttcctgtgcgcctcgacgagtgtaacggagatgtccggatcgggtgcgggtagcgatgcggccacgaaatcgctgccttcggtcccgccacgggtcagcgcgaccatgttcggctcgttgatggtgcatacccaggtgacgtcgtggagtatcgtcatcacgtaccgcacgtacctagcgaagtagtcgacggcatcggcgttgagccatccgcccttggccgcaagccactgcggcagtgtcatgtggttcagcgtgaccatgggctcgacgccgttctgatggcacacgtcgatcatatggcggtagtgcagcagctgcgctttggagaagcatccctccgcaggctcgatgcgggcccattcgatggagaagcggtacatgcgcaatccggcgtcggcgagcattctgatgtcctcgccgtagcgatggtagctgtcggccgcgtctccagacggttcgttgaggtccgtgcgttcggcatgctccctggcccaccagtcgctcgcgacgttgttcccctcgatctgatgcgcggctgtggacgcgccccaaatgaattccggcggaaactcgtattgttctttcatgacatgtctttctatttgatgcccgttccggcgacaccttggatgaagtagcgctgcaggaatacgaacagaaggaggattggggtgaccaccaatactgctccggcgagcaggacgctgtagttcgtggcgttctggccggtagagtagagggacagagctacaggcagcgtgtacttctcctcggtctgggccgcgaccaacggccacaggaagttgttccaggaggacaggaacgtgaggatggacagcgtcgccagcggcggcccgcactggggcaggacaatctggaagaatatgcgcagctcgccggcgccgtcgaccctcgcggcctccatcagcgcgtcggggattccggagatgaactgtctcatcaggaagactccgatgggctgacacaggaacggcaggatgagcgccgcataggagttcgcgagtcccatgttcgagatcatcacgaacaaagggacgaacgtggccacgctcggaaccatgagcgtcaccatgacggcgccgaacagaatgttcttgccagcgaagtccatcttcgccaaggcgtatccgaccatggagcagaacaccatgttcccgaggacggtgatcacggcgacgactatgctgttggtgaagtaggtgccgaagttcagttccccgaaccatttggcgaagttcgcgagcgaggcgtgctcgggcaggagcttcggcggtttggcgaggatctctctctgggtcttcaacgagcccaacgccatccataggaatgggaagatccagaagactccgatcaccgcgagggcgcagtaggagaggccacgtcctttgacgaatcggcgccagatcggctgcttgttgctttgcggcttcgatgccgcgactgtcgtggctgtcatctcaatcctccttaagaatgcggaactggagcacgctgaccagcgcgatgatgatgaacagcgcccagctggctgcggaggcgatgccgtactgtccgaaaccgaacttctggtacacgtagtacgcggcggagagcgtcgaatcgagcggtcctccctgggtcatcacgaaggattcctcgaagaactgcaggtaggcgacggaaagaagcacggcacccagcagcagcgtgggcttgagcagcgggagtgtgatgctacgaaaggtgcgccatttgcctgcgccgtcgatggccgcagcctccttcaattcctcggggatggcctgcaggccggcgagaaaaatgatcatcagcgttcccatgttgcgccagatggtcatggccatcagcgcgggcagggcgtagtggatgtcgtgcagccagtctggcccggcgataccaaagacggccaagagcgagttgagcaagccgtccttctggaggatgtacctccacacgacggagaccgcgaccacgctggcgacaaccggcgcgtagaacacggccctgaagaacgcgttgaggtgcctggatcctttgttgagggccaccgcgaatgcgagggcgatcgccatggtgatcggcaggccgacaagcacgaagattccggtgacgcccaacgcgtgcaggaaacggtggtcgtggaacagggcgatgtactggtccagtccgacgaagttgacgttgaacggggtgcgaaggtccttggaggtgatgtcggtgaaggacatcgccatcgaggacaggaggggaatcagcatgaatacgcagaacacgactgcgaaaggcaaggcaaatccccatgcgagaatcgtacggcggcggcggaggacgttgcccgagccctccgtcttcgtctttcttgtcccgaggctcatgggatcagtttcccgttccgatggagtcggcttcggactgcaggttcttcaggccctcgtcaacggagacctgtcccttgtttatctgctcgaggatgcggtcggcaacggaggacacctgcgcccaggtggacagcgccggcggagccatggtgttcttcagctggtcgccgaacgccgcaagcttgtcgttgccggagagcgcgtcctcatcccatgccttctgagaggcgggcaggtcggaggacttcttgtaccattcggcctgcacctcgggcttgcttgcccactgaatgaacttccatgcggactgcttgttcttggagtccttgaacgtcacgaggttgcagcctccgacgaaggacgtggcgggacccgaggattcgttcatcgacggcagaatcacggtggcgtacttggattcgaagccgtcgccgcccaattcgttgatctggctgacggcggtcggcccctgcagcatcatcggtgtgctgccggatacgaaattcgctatgtcggcgccggaactcacgtcggcattgacatccactatgccgtccctgtagaggctagtggtaaagttcagtcccttctttataccgttatcgtcgaaagtccatttcgtctgttcctcattagtcaaggacgcccctgccgagtaggagaacggcagagtcccaaggaacgcatcagtgccagatgaattgaggctcatgccatatttgaccccgtcgaccttctgcatgtccttggccatccgcttaagctcattccaagtcttcggagctttgttccaaccagccatcccggcgatgtcggtacggtagtacagcactcgggtgtcgatgtaccaaggcacgccgagctgtttcccgtcgacctggccagtagccctagacccgtcggagaaatcggacatgtcgaggttgtcaggcacggtggaaaacgagttggagaaatcggccatccaggtggtgcccatctgcgcaaggtcgggaccgttgcccgcagcgatggcggtctggagtttatcgtgggctgaggaccatggaatcgcggtgaccttgatcttgacgtcagggttctccttctcgaatcccttaacgaaatcatccagcagatcaccctcgttgcccatggcccagatagtcaggtcgccggtggccttgcttgaattgatggtcttgaccgcatcggaatcggaatctgcgccgctttcggatcgcccacacgaggacatgccgataaccatgaccgcacttacgaccgtcgcgacagacgccttaaaaaatgatttcatcattgaaactccttataaatataagtatcagtctaaccgcttagattgatacttatatttaagcgcatagattgttttcagtcaagaagacacaccaataatgctccgaacttctgagttttattccatcagccgcatccacagctgccacgcacgatgaggcgaacaggcaatattagtttttccggtttttcccagggcttcccattcctggaaagcagcatccgcacggccctgcgtcccagctcctccataggctgacggatggtcgttaggcgtggagtcatcagcctacccgctaaaatgccgtcaaagccggtgacaatgacgtcttcagggacacggattccagaatccacgagcagtctaatcacgccaaaagccgtctgatcagtgccgcacaccaaggcctgcggcaagcgattagattctatcgcctcacacaaactaaccaaatattcatcagacgtggcgaaagagtcatccaacagagcccctctggagtccagcccgcgttcctcgaggtattttttaaacgcgtcataacgcgagacgacgtcatcagtgacggtaccgctcacgcacgctccaccattgacgccaccgacgaatgccatatcgttgatatggtgaacttcgacaagatggtcaacaatctgtcttatgcccgatgcgttatcgcattgcaggtatgcggcaggcagtttttcatcgcccacacccaccattacaagcggaatggtcttcgccaacatggaaagagggagcgtatcgttatatccgcttggcatcagcgccagtccatcaacgcaaccggcgatatccgttacagatctgtgatcatcctttttcgaggcggcacccatgagcatgcccttcccgctcttccagcattcgagttcgaagccgcggagcacctcgtcgacgtacaagggatatgcgaggacatctggttcgtcatcgtccacagacgcgttgaccgtcgcagaggatgcgtcgggtcggtcttcctcgaggtcgctgccctggggcctctccaacagcatgtcgaacgcgtacatgcccaacgtgccggttctgcctctggcgaggccgcgcgcattgccgctgggaacgtacccaagctcctctgaaatcctgagaattctggccttggtatcatcctttactttgtcgggatgcctgaaggcgaaagacaccgttgcggtagacaccccagccttttccgcaatatcatacactgtaactcttgccataagatcagtctaagcgctttgacacatgagacacacgcggactgaagtccaaaaagcttcctctgaccgtccgcccggcaccccgggcaacgtgctccggccggcaggccggcaaagcaaaacaaacaaaatgggggttcccggagcgtcacgcccgacggaacccccaagggaaatacgaaagggaccttccgggaatcccataagggactcgaccagaaggtccaacgttgaatgcggcggcgtgctactctcccacaccctctcgagtgcagtaccatcgccgcgaccaggccttagcttccgggttcggaaagggaccgggcgtctcacctgggccatgaccaccgcaaaaccaatacaacagccaaccggaagaaccggcggccggcaacggaaccaaccacgattccgatcgtggcggtccgggaaccggacaacggacgcgagcaaccaaacgcttcaccggtatcgtttccgtgaccacaagaaacaatgctccttgccatccaacgaaagaaaccaccacaggacgagacccaacccaacaagcggattggaaaaagtgtgccgcgttcgcccgttagtaccggtcggctccacccctcgcggggcttccacctccggcctatcaaacacgtgttccacatgcgggctacaggcaccgaaagtgccaaggaatcctaatcttggagcaggcttcccgcttagatgctttcagcggttatccctcccgaacgtagccaaccggccatgccgctggcgcgacaaccggcataccagaggtccgtccacccaggtcctctcgtactatgggcaggcctcctcaggattccaacgagcgcagaggatagagaccaaactgtctcacgacgttctgaacccagctcgcgtgccgctttaatcggcgaacagccgaacccttgggacctgctccagccccaggatgcgacgagccgacatcgaggtgccaaaccatcccgtcgatatggactcttgggaatgatcagcctgttatccccggggtaccttttatccgttgagcgatgccgcgcccgtgcgccggcaccggatcactatctccgactttcgtccctgcccgaaccgtcgttctcgcagtcaagcccgcttgtgcgattacactcgaaacccgattgccaaccgggctgagcggacctttgagcgcctccgttactctttgggaggcaaccgccccagttaaactacccgccaggcactgtccctgaccaggatcactggccgaggttagacgtcaaacgagaacagagcggtatttcaccttgcggctccacacgggctggcgcccatgcttcgaagcctcccgcctatgctacacaatccgcgcctaacgccaataccaaggtatagtaaaggtcccggggtcttttcgtccttctgcgcttaacgagcatctttactcgtactgcaatttcgccgagctcctggtcgagacagtggggaagtcgttacgccattcgtgcaggtcggaacttacccgacaaggaatttcgctaccttaggatggttatagttaccaccgccgtttaccggggcttgaattcaccgcttcacccgaaaaggggctgacggatcctcttaaccttccggcaccgggcaggcgtcagtgcatatacagcggcttgcgccttcgcatgcacctgtgtttttggtaaacagtcgctaccccctggtctgtgccaccccccaacgctccgagggcaagcctcttcacgcccgggggtctcccttataccgaaggcacgggagtgatttgccgagttccttgaccaggattcgctcgatcgccttggtattctctacctgaccaccagtgtcggtttggggtacgggcggcaacgcccctcgcgccgaggcttttctcgacggcctggaccaccggatatcgcgcccaaaagacgcccatcatcacacctcaccctacatgccccacggatttgcctatgggacgggctgcgtgcttgaccacggaaaaccacctccgcggccggctcccattccgtgtcacccctgtgcgctaacctaccaggactacgctcccaacaaccgcggaccccgaaccccgaagggaacgacgccacgcgaccggaggttagtactcatccgttcggctcttacggtacgccgccggtacgggaatatccacccgttcatccattcgactacgcctgtcggcctcgccttaggacccgactcacccggggacgacgaacgtggccccggaacccttggtcatccagcggacgggatcctcacccgtctctcgctactcatgtctgcattctcactcccgcgcggtccacggcacgtttccacggccgcttcgccccacgcgggacgctctcctacccagcagccgcaaaggctgctgccgcgtcttcggtggtgtgcttgagccccgctacattgtcggcgcggaaccactagaccagtgagctgttacgcactctttcaaggatggctgcttctgagccaacctcctggctgtctatgcgactccacatcctttcccacttagcacacgcttcgggaccttagacgacgatctgggctgtctccctctcgacgacggagcttatcccccgccgactcactgccggaatacacatccacggtattcggagtttggctgctattggtacccgacacgggcccgcaagcatccagtagctctacccccgcgatgcaatcaaccgacgctgcacctaaatgcatttcggagagaaccagctatcacggaatttgattggcctttcacccctagccccaggtcatccccccggttttcaacccaggtgggttcggtcctccacgcggtcttacccgcgcttcaacctgcccagggctagatcatcccgcttcgggtccagggcgcgcgactcaaaacgccttttgagactcgccttcgctacggctcccccaccacgggttagcctcgccacgcaccactgactcgcagactcatttttcgataggcacgccgtcaccccacacggaggctccgacggattgtaggcgcacggtttcaggaactctttcactcccctcccggggtgcttttcacctttccctcacggtactggtacgctatcggtcagacaggtatgcttagacttaccccacggtcggggccgattcacacgggattccacgaggcccgcgctacttgggacgcatgatcggaagacggcaagcttccaggtacggggctggcaccctctgcggccaggccttcaagcctgttcccctggcaagccgttttatgactcccgcccggtccgtcggaaccgggacacacgctccctcaacaccacggacgcaacccccgacgggtatcacgcgcccatggtttggtctgatccgctttcgctcgccactactcacggagtatcccttcctgcaggtactgagatgtttcacttccctgcgtacccccggaacaacaacgttccgtgccggcccatgacggccggcgggttgccccattcggaaatcctcggatcgaagccatgttggaggctccccgaggcttatcgcatcctcaaacgtccttcatcggtactgtctgccaaggcatccaccatacgcccttcagggcggcacacgccccgaaaaacccaatgatagcttcaaacgccagacgacaaatcatcacactgtaaaaaatgatcacaaaacgatcgatctcgaaaccagactcatccaaaaaagaagagcctggcgaaatcgcgataaagcaaacgatgacataacatcatcgcattgctcgcgtccactatccagttctcaaaccaccacgcgccccgaccggacccggcccgcggcccgcaggccgacggcgtcccgccaggggcatccggaaaaccgcacgcgaccaaacgtcgcgggtggcggtccgggaacccaaaagcatatccgcaccactccccgccggccccaagggaaccagcgaagcccatgatctcttccacaccagcacgcccacgccagaccggagacgatccccggcgcatgggccacacgacggacgacaaaccatcgtcctgaaaaactccgtagaaaggaggtgatccagccgcaccttccggtacggctaccttgttacgacttagtcccaatcacgagtctcaccttagacggctccatccacaaaaggttaggccaccggcttcgggtgctacccactttcatgacttgacgggcggtgtgtacaaggcccgggaacgcattcaccgcggcgttgctgatccgcgattactagcgactccgccttcatggagtcgggttgcagactccaatccgaactgagaccggttttcagggatccgctccacgtcgccgtgtcgcatcccgttgtaccggccattgtagcatgcgtgaagccctggacgtaaggggcatgatgatctgacgtcatccccaccttcctccgagttgaccccggcggtcccccgtgagttcccaccatgacgtgctggcaacacagggcgagggttgcgctcgttgcgggacttaacccaacatctcacgacacgagctgacgacgaccatgcaccacctgtgaacccgccccgaagggaagccccatctctggagcggtcgggaacatgtcaagcccaggtaaggttcttcgcgttgcatcgaattaatccgcatgctccgccgcttgtgcgggcccccgtcaatttctttgagttttagccttgcggccgtactccccaggcgggatgcttaacgcgttagctccgacacggaacccgtggaacgggccccacatccagcatccaccgtttacggcgtggactaccagggtatctaatcctgttcgctccccacgctttcgctcctcagcgtcagtaacggcccagagacctgccttcgccattggtgttcttcccgatatctacacattccaccgttacaccgggaattccagtctcccctaccgcactccagcccgcccgtacccggcgcagatccaccgttaagcgatggactttcacaccggacgcgacgaaccgcctacgagccctttacgcccaataattccggataacgcttgcaccctacgtattaccgcggctgctggcacgtagttagccggtgcttattcgaaaggtacactcacccgaaggcttgctcccgatcaaaagcggtttacaacccgaaggccgtcatcccgcacgcggcgtcgctgcatcaggcttgcgcccattgtgcaatattccccactgctgcctcccgtaggagtctgggccgtatctcagtcccaatgtggccggtcgccctctcaggccggctacccgtcgtaggctcggtgggccgttaccccgccgactacctgataggacgcgaccccatcccataccgatgaaatctttcccgacaccccatgcgaggagtcggagcatccggcattaccacccgtttccaggagctattccggtgtatggggcaggtcggtcacgcattactcacccgttcgccactctcaccaccaagcaaagcctgatggatcccgttcgacttgcatgtgttaagcacgccgccagcgttcatcctgagccagaatcgaaccctccacaaaaaaactttgcagaaagccaacatgtgactctcaaaaacaagaaaattgacgatcgccttataaggaaaggcgcatcgcacgaaaacctcaccgtccttcaaggcctcccggccactcgcgaacgagcggacgatgaactggcaatcattgactataaagaagtagtacaaatacgctcttgagttctcaaaccaccaccgctcacccgcctcgaggcaccccaaccggggaaccactcgccgagcggcagcgaagagtcaatttacacgaaccccggcgatcacgcaaatcgacccttccaaagataccctggaaccgttgcaaataaacacatccctcggcgtgtcgaaaaaggccttcgaacggccgtacagccagtctaggccccgaagacaacgcccacatgaaccaaaaacaaactataaacggcgtgtcatacccatacacatctcattcccatgtgatgaacacccaaatgcaatcgcaaatcatgattccagcggaacagaaagaacagaaatacaaaagagacgcgaagaagcatgaaacctggctgcacttgcgacggcacgcacgctgaaatacaacaagagccgccgactcagggaagtcgacggctctcgctgtttcaattgttattcagttatgttttgacctgtgagaaggaagtgagatcaggcagtgacctcagccttggccttcttgcgatccatgtagcgcttgatagccagagcctcaagtgcgatcaccaggattgcggtcacgccccaagccacgtacatggcggtcttccagatcggggtggcgaccttcggctcaccgtctgcatactgccagctgttggcggcggtgtacagaatattgtgggcggcggtacgcatggccttcacggaggttgcggacttgtcggtgatgtggttggtgatggaggtggtagccagcatggaatcgttgccgttacggatctcctgatcaccgttctggtagccgtagccgccgaaataatcggtcaggacgaagcccttgaagccccactcgtcacggagcacggtgttcagcagagcgttgttgccaccggcataggtgttgccgatgtagttgaaggcgctcatcacggcctgtgcgccgccttccttcacgctcatctcgaacggcttgaggtagatctcacgcatggcctgctcgttggtccaggtgcagagcatctcagtacgcttggtttcctgatcgttcagtgcgaagtgcttcatgaaggagtacacgcccttctccttggcgccggcgatctcgttggatgccatgacgccggagagcagggaatcctcggagaagtactcgaaagtacggccggagaatgcgttgcggtggatgttcatagccggagcgtaccaaccagcaacatgcatgtcgtgagccatatcgccgatcatctcgccgaactgcttggccagatccttgttccaagtgcaagcgaatgcggtggaagccgggaagccgatggagccaacaccagtgaagttgttgttcaacgaggccgggccgtcagcgtcggtgagctggatcttgccgacggaggagacggccggagtgccgtagccgccgttggcaatgaggttgtccatatcgtcgaaggtcagctcgtcaagcagcttctcccaatcagcatcgtcgtaatccttgccgtacatgtcggccaggcggaggccatttctggcaccggtggtcggcatctcgtcggaatcgtcgttgaactgagacggatcgtagttggtgttgttgtagaaggtttcctttgccttatcagacatttcgaagttggtcggagcggcggtggcttccttgtagtttgcgaaatgtcctgcacggctcaggtaggtcacatcgcctgcagcatcatcgaactggttggtggccacggtctggtcgccattgtgggtgttcgaatcggagtcgtaggtgatggtgtcgtccacggtgatcttcttggagccgatcacagtgtgggagtcggagttgatggagatgttgtaatcgcccttttcgagcacgtatgccttggcattcttgtaatcataggaagccatgtcatcgtcttcgaattcgacggtcacgtcctcggaagcgcccggctcaagcttctcggtcttctcgaagccaaccaggttggcactggccttttcgatgccaccttcggtgtacggcgggttgtagtagacctcaacaacatccttgccagcggtgtcgccggtgttggtgacggtcacatcaacggtgaccttgccatccttgtacgtcacatcgttgagcttctgctcgaaggtggtgtagctcagaccgtaaccgaacgggaatgcaaccatggaatcgtaatcgatggcaccttcggccgctgcggtctcatagaacttgtagcccacatagatgccttcggagtagttcacaaagcccggaatggcggtgacttcgtcaccagtgaagcccgtgtacttggcggccttgtcttccatgttggtgtattcgaacttgccgaagttgttgtaagacaccgactgggtgagatccttcaggaaggtgtcggaagtcttgccggacgggttggtatcgccggcaagcacgtcaccgagtgcggagaagccggtctggcctgcaggcgggcaccacacgacggatttgatctgcggatagtcgttcaggaagtcgaactggaaggtgttggcgccgttgtagacgagcgtgaccttgttgaagttcttggtgaccaggtcgagcatatcgcgctcggtctggctcagctgcaggaagctttcgccgtccttgaagtcctcgtaatccttggagttgttctcataggtgatgccttcggccttcatgttcatcggaaggtcagcgccctcgccaccgacgcgggtgagcactacaacagcctcatcggagaagctcttggcatcggagatcagggaatcggaatactggtcggccggaacctcaggcagggtccaatcctgtgcccacatgccaacaactgggcgatctgcacggtaatcggtgtacagcttggtcaggtcggcgttggtctcgatgccggcttccttcatgccatcaagcagggaaacggtgtcgtactggtcggacatggaaccggagccggtgccgccgtataccgggttggtggagccccaaccgaacacgttgaccttcttgttagccagcggcaggttggaatcatcgttcttcagcatggtgatggcttccgactgcacttccttggccagctcgttggccttggaaacagtggtgtcagacagcatgtacttggtgatggtcgcgttgttgagcagcgtcgacagcggaccggacagcatcatggaaaccgcgacgacaatgccgaccaaagccacaagccaagactcggagtggatgatcttacgggtcgccacttccttcaccgtcttcttgttgacggcaaaagtaatgatcagcgcgagcacaaatagcacgccaatcgcaatcaggtacggcgtcaacgaaccgataacgttcatgacgtcagccatgttgatttgcagcatggtctgcctcctccttgattctcataaccaaacgacatgcaggctccgatttcctcatcgaaaccagaaatcatgcaacgctgccccgcgtcacgcaatttccagaagtgaagacacttcttcatgtcgatgtttcgatttcaccaaaatccgcgaaaaaagcaccttgatttttcccagcctgtcgtttcgcgtgcataatctgcataccacctgcgcatgtaaaactaccattcgtgcacatataatcccgttgcgcgcatgcatctggcacaatgtgcgctcatccgcagattgttgcaacatccttgccttgattgcggaaatcatcgatcttcattgcgcttccaactccataatcgcaattcctgcgatattttcggcacactacagcgagctgttccagcggcaacttacgtaaggcaagtaccatgggtgccatgagcgacttaagcgcattgaatctggaggcaggcaacctcgttggcggatacacgttgatttcccggcttggatcgggggcgatgggatcggtctggcgcgtgcgcgatgacggcggacaccagtatgcgatgaaaattttgcgcgattcccttgccgaggacgatgcgtccagcgaacgctcccgcgatcagctgaccgcacgcgagcgcctgcgtagggaggctatggcgctgcagaaagtgcgtcatccgggcgtgtgcggcattgtggatatggaattggatgatgctctggccttcattgtgaccgagctgatcgagggcaagaatctacgtgaagatgtgcgtaccaacggccggtatgtgggcgatgatttggaacggttgggacgcaagctgatcgaggcggtgaaggccgtgcatgcggccgggattgtgcatcgcgatatcaaaccgacgaatgtgatggtgtcgaataccggaccggtattggtggatttcggcattgccatgggcgagggcgaaagtcatgtgactcgtaccggattggtgatgggcacgcctggattcatcgcgccggaaatcatcgacggtgccgaatccgatgagatgagcgattggtggtcggtggcgagcgtgctggcatttgccgccactggcgagccggtgttcggcacgaaaccgatgatggcggtattggagcgtgctgccgcgggaaacgcgaatttggcgggattgccggctgggaccatggccgcgttccgttcggcgttggatccggatcgtacgaaacgttgcactccagacgagttgttgcaggcgattgcgttggatgcgttgaatccgcaagcttggatttcggggaatacttcggatgccgccgatagtgccgggtcggaggcgatgctcccttttgatggatcgcccgacaatccacgaatgctttggcgggcgttagaccatgtgacgggagaagacgccatcggcacgcgcaccttgccgcaattcgttgaggccacgcaggcaatcggcgcaaccgttattgctgacataaccgataccgttattgccgatgcgcccgatgtcggcacctcggtcatggatatcaacgcgcataccgcaaccattcctcttggcaccggcacgcgcgtgctgcctgtcaatagtggggataccagtgtgctgccgcaagatacaccgcaatccacgcgggtgatgccggtccaggacgcttggaatcccgctcaagaggccgcacagatcgacccggccatcaaacctgcattgcagcgcatcgccaaccagcggcctcctgccgtaataccgaacgcatcggttgaaatggcgcaaagtgcgcagccacaagacatgcaaacatctgccgtgccaaccgcaccggtcactccggccgcgccgctcaacccgaacgtgccgcagagtgtactgcagccgccgaatccggccgacgtgcaacgcggcgaactgctaggcagaggcgtgcccctctgcgtgctgatggcgattcctgtggccgcatgcggcctgttctcgccatggatcgccctgatcgcgggggcgctgctggcctggttgctcgccaccattggattcaatatggaggcgcagctggaacgcgaaggccgccgtgggggcagccgcaggacttccgactggttcgcccgcgccgccacgctgccttggcatgtgctcaaggggctgggttatgcggtgccacgcgcactgatcatggcggtcatcgccgcattaggattgacgattgccacagtcacgctgcaactgccgtttgccatggttgatacgtcgatattcggattcacgattccgctgccgacctggattgaagggccggtttcgcaaagcggcgtcgcccaggccggttgctgcgccatcggctggctggtatgcgccctcgctccgggagcattggtgctgcgattgggtgccggcgcattgcgcggccgcccgaaatccggcaccactgccgaatcgtacgatatgtagtgacgccatctcacgaaatacgcagcgaaaatcaaaaatcggcaaacgtttgcaatcatcagaaaaacatcagataatcgcacgtagtatggcaacgtgagcttttacgaaatacttcattcagcaatagcgtgcccacactactatggtgcacagcatcgtgatgtgaacatcgaaaggaatgtggatggcccagaacagtaaggatgcgcagaagcgcgccagccgcgccgagcgtagggccgctgaggccgcggagatgaaggctcgcgccgaacagatggagaaggagcgcaagcagcagaccctcatcggcgccatcgtgatggcggtgctggtgatcctggtggcgatcggcgcgttcaccgtgtatcacaacatgcacaagaacaccgaaacgcaggcttccacccagaccgtggaagaagcgtacgacaagctgcagcaagtcgaaaacacgccaaagctcgtcgataagaagggcggattgctgatttcgaaggatggctacggcaagtccgtcgaaggcgcaccgactgttgcgatctacatggatttcctgtgcccgggctgcggcaatctgcatcgtcagcttgatgaggatctgcagaagatggtcgacgcgggtcagatcaatcttgatttgcatttcatggcgtttatggacaagtggtccaccgacgattattcaagccgcgcagcgaatgccgcgatctatctggccgagcatgacagcgatccgagccatctgatcaccttcctcgaaaaaatgtacgccgaggatttccagcctgaggaaagctcgaattacaagtccgtcagcgacgatcagatcaaggaacagatgatcgcctcgggagtttccgaggatgtggcggacaaggcgttcggccgcgactaccaggattggcttgacgccatcgacacctatacgccgaagcgctccgaactgtggaacacgtccggaacctacaaagacagcatgaccaccccaacggtgaccatcaacggcaagttctgggatatgaaccagttgagcactgcgcaggagaccattgaggaaggcctgctggaggccatcggaatcaagtccgacgacatcggcaaggaaggcgtgatgccctccatcggctccgacaaggatccgatctccaacaccactggcgagtgatcagccctacgcaatcctcataatcgaaaaattatacccccctactcgccagcgtgccagccaaagcgcagttccaagttgacggtatcgggcacgctggttatgctattcaatcgttgccgtttttatgcattatgctagaaagcggcacaagcctccttagctcagatggccagagcggccgccttgtaagcggcaggtcgtcggttcgatcccgacaggaggctcgaaacccgttttgacgggctttgacctcttaccatgggtaagtgatccagaagccttcccccaacttatggcttctggcgaccggacgaggcttcccccaacctgcctcgtccgggcagggggcaggacatccccttctctcctgcccccttttttctttactccttttcctcgaaaatgtggcggtatagataaagccagcggaaaccatgccattcgtcccgatctgaccgttacaatgacggcgatgtaggcagtcgctggaaagaggacgtatgacaagaaggtggaccccccggagattcgtgacgcttcggcgtgttcgagtgacggcatgcgtggtctcgttgacgctcgcctcgacgctcgcattcggcgtaggcgcgcgcaaaaccgtggctctgaccatcgatggcgaaaccaccaccgtaaccacatacgcgatgagcgtcgaccgtctgctgcaggaacgcggcgtgaaggtcaaaacgcatgatctcgtggaatccaccagccccaccagcatgctgagcaaccatgacgtggtgacggtacgaagcgcctaccagaccaccatcaccatcaacgggcaggaagtgcccttctggacagtggcgaccagcgccgaacagctgatcggattcttcgaacaaaacgaagcagacgcggcaaaagtcaccgtcaatatcgacaacgtgtacaacaaactcaccggcggactgatcatcaaccaaaacgggccggtcaccgtcatcgcagacgggcaaagctccgaatcgccgaatggcaaactgccggcggcctccattcttgactccaaaggcatcacgctgaacaaggaggatcgcgtcagcgtcgaaaaagacaacggcgaaacgatcctgcgcgtccgccgcgtgacgcacggcgaggaaacacgcacgaaagcggtgcctttcggcacgcaaaccatcgtcgatcccagcctgcagaccggcgaagtcgtagtcaggcaggaaggcgaggacggcgaaatccagcaaacgtacgacgtcacgtatgtggacggcgagaaggaaagcgagacgctgaccaacgaaacgaccacgaaaatcgccctcgatcagattatcgcagtaggaccggcagcatcttccgacgattcgggatcggatgacggatccggcaattccggagataccggcaattccgataattccggaaagaacgacaattcgaacaagaacaacaattccgataattccgacaagaaagacgatccgaacagtaattccggcaatacggataattcagacgacaacaagaaggacgattccggatcgaaaacggacccggatccgacgccaactccagacccgacccccacgccaactcctgacccgacccccacgccggatccgacgcccaccccgacaccgcaaccttccgatccttcggcaggatgccgcctctatcacccctcccccgcgcaggcacaggcctacgcggccggagccgcggcgcaatatggctggaccgggcaaaactggaccgatctggtgaaactgtggacgcgtgaatcgagctggctgtggtatgaggaaaacgcatcttccggagcctacggcatcccgcagtcgcttcctggcagcaaaatggcggcattcggcgcaaactggcgtgacgatgcggccgtgcagatcgactggggcctgagctacatcgcgcaacgctacggcagcccgtcgaaggcatgggagcattccgagcaggtcggatggtattaaacaacgccgatcgcaacaatacgcaaacgcaacagcgcacacttttcataccagttgaacggataatgaggtaatgacagaacacgcgaacgaaaccaacgcaaccgacgaaaccgcgcaaggccgcctgttgggggctgccgacattcggcgtatcgcggccgaggccggtatcagcccgacgaaaaaattcgggcagaatttcgtaatcgacccgggcacggttcgtcgtatcgtgcgcgaggcaggtgtgaccgccgacgatcatgtgctggaagtcggacctggactcggttcactgacattggcgattttggaaaccggcgccacgatgaccgccgtggagatcgacccgcccgttgcggaacgactgcccggcaccatcgccgaattcatgccggatgcggtggatcgtttccgcgtggtcaatcgcgatgcgttgaccgtgacgccggaaaatctgcctgatttccaaaatgatgattcgtttacactggtcgccaatctgccatacaacgtggccacgccgattctgctgaccttgctggaacgtttcgacaatctcggcacgttcctcgtgatggtgcagaaggaagtcgcggaccgactgagcgaaaagcccggttcaaagatctacggcactccaagcgtgaagctcgcttggtatggtaccgcggaacgtgtgggcattatcgggcgcaatgtgttctggccggcaccgaatgtggattccgcgctggtgctgttcaaacgatatgagggcgggcacacgccttcggccaacaatcccgacggttccgtagtggaccgcgaaaacgtgttccgtcttatcgacgccgcattcggccagaggcgcaaaaccctgcatgccgcgttgaagaagatcgtgccctccgaagcgttcgagcaggcgggcatcgatccgacgcgccgtggcgaaacgcttgccatcgacgaattcgtggcattggcacgagccgtgggcgaggtgtcgcaagcatgagcgacgccaacaccgcaatcaacacggtcagcgtggactgcccggcgaaaacgaatctgaccctgcacgtaggcaggccacgcagcgaatggggtggccgacacgagctcgacaccatctactgcgccgtcggcgtgtacgacaccgtcaccaccagtcgcaaaaagcccggatccggtttctccctgaatcttgaaggtgcctatcttggcgatctggcctcctccggcagcgacatgcgacgcaaccatgccgtactcgccctgttcgccatggccgaagcgagcggccatgaaccggatgtggcgttgaacattgaaaaacgcattcccgttggcgcgggcatggcaggaggttccgcggatgcggccgccacgattctggcattgaacacgctatggaatcttgattggtccattgaacggttgcaacaggttgccgccacattgggcgcggatatgccgttctgcctgaccggaggctatgcgcgaggcaccggcttcggcgagcagatcgaacaactcagcgaaaacagcgacgccgtgctggaactgacggatcagggctttgcaggccgtctgctggtcggcgcgtatcaggcggaactgcgcacgccggaagtgtatgccatgttcgaccaaatcggcgccggcgcaaccgacaacaatcatctgcaacaggcgtcgatctcactgcatccacgcagcggacaggcgatcgacgaagcgttgcaggcaggcgccaagcaggcgttcgtctccggatccggcccttccgtaatcgcattcgtgccaaccgacgatgcggcacgcgccgtgcagtcggcatggcaacaaagccgttgcgtcgaccgcatcatcgccaccaaggcaccggcccatccgattgtgcatatcatcgcgtaacagtaaggttgaagtcaaccgatttttggagaaggactcgtacatgactcaggctaacgacgagcgcgccgcgcgcaaacagtacattcgccgccgtcaaaaggtggtgttcaccatcaccggcaccattttgacgatcgcattggtgatttccctgctgttcttcttccatgttggaggattgggcaatgtcaagtcggccgcggtacagccgaattacggccagcaggccccttgcgcagcacaggaacaggacggcagcaaaggcaagtacgtggaaaaccgcaacatcaccgtgcgcgtgctcaacggcactgaattcgccggcttcgcgcaagccgtcagcagcgcgttgcagaaccgcgagttcaacacccaggcagccggcaactacaccagctccaaagtggaacgcacgatgatcatcttcggcaagaacgccatcaatcaggcgtacacggtgaacagcaacttcaccgacgcgacgatggtgatggacgatcgtgaggatatgctgatcgacgttgtggttggcgcgactttcgacaatctgcagaatcagaagaaggtgccgaccgccggcaaggagatcgacagcttcgagggatgcgttaccgtcgacaagatgaccgacgtacagaaggcccccgaacacgacgccgtgtgatttgcagattttttgatttgcagattttcggattgacctcacgatttcgatttttcactgaaaatcaaggtcgtgaggtcaattcttatattcgtgggttaaatcgcgggcgaaatcctctagagaatacccccgaaaccgcacttttcggaaccgactgacctcacgattctatttttttcccgaaaaatcgaatcgtgcggtcatagaatccaaatcgtgaggtcagcaagcagactactcggcctgctgttcctcataccaacggttcaactcggcaacagcgacatcacgctcgaccgggccgttatcgaggcgatattccagcatgtgcttgtacgccttgccaaccagcggtcccgggtcaatgccgagcagctgcatgatttcgtcaccgttcagatcagggcggatcgcgtcgaaatcctccttctccttcagatcgcgcacgcgctgttccatctcgtccatcgccgacgagaacaccatggccttgcgcttgttctgcgtggtcgcgtcggcacgcgtaaggcggttcaggcgctcatacagcggacccgcatccttgacgtaacgacggaccgcggaatccgtccacggctcctccacgtagccatggaagcgcaagtgcagattgaccagctcgctgacgtcctcgaccatatgatggtcgaaatgcaatgccttaaggcgcttgcgggtcattttcgcgccgaccgcatcatgatgatggaagctcaccttgccacccgattcgaaacgacgcgtcttcggcttgccgatatcgtgcatcagcgcggccaaacgcaacgtcagatccggtgccggcacagggccgtccgggccggtttcgagggcaaccgcacgatcaatgacgatcatggtgtgctcgaacacgtccttatgacgatgatgttcgtcgatttcgagctgcaatgccggaatttccgggaagacgatatcggcaagaccggaatcgaccagcgcttcgatacctgcgcgcgggcgatcggacagcagcattttgaccagttcgtcgcgtacgcgctcagcggaaacgatttcaatgcgatcgaccatgtcggtcagcgcttcagcggtttccggttcgatacggaagcccagttgcgccacgaaacgtacggcgcgcatcatgcgcagcggatcgtcgtcaaacgactggcgaggatcgaccggcgtgcgcaacacgcccttggccaaatcgttcgcgccgccgaacggatcgacgaattgcaattccggcacacgcaacgccatggcattcaccgtgaaatcacggcgggaaagatcgccttccagcgtgtcgccataattgacttccggcttgcgcgagtcggggtcatacgtgtcggaacggtaggtcgttacctcaacctgcacttccgtgccatcctcacgcctgcgcatggcgcccaacgtgccgaatttacggcccatatcccaaaagccatcgcgcccgaaacggcgcaaaatgtgttcaaactgctcaggacgcgccgatgtgcaaaaatccaaatcatgcgatttacgatgcaacagcaggtctcgaacgggacctcccaccaacgccaattcatagccttccgcggcgaacatacgccctaattcaatggcctctggccacacttcgaagttcacgccatccctttccggcaccacaagtttctgccttaccagcataccgttaccccacctgcacacagaattgagtatggttggaatcatgattacgcccgcagaccttgcacgcatgcttgcccatgctgcggacgaccatgcccaaaatccgatggaaccggacaaactgctgtacacatcgcagtccgtttccttgcggcaagagaccatcatcacgcccaacgcacccaccccggcaataatgccgcagcggcgcgccacggacggtccgaccacgttcgcctcgctcgacgcgcaggaactgccggtagtgcgcgaatattcggcgggaggtctcgtattcgacgacaagggccgtgtggcgatcatcgcacgccactcgcgtagcggacatttggaatggtgcctgccgaaaggtcatatcgaaaaaggcgaaacaccgcagcaaaccgccgttcgcgaagttcacgaggaaacaggaatcctaggtgaagtggtcgattccatcgccaccatcgactactggttcaccggaaccagccagcgcgtgcacaagctggtgcatcatttcgcattgcgtcagatcggcggcgagttgacggtggaaggcgacccggatcatgaggcggaagacgcgatttgggtggattttgctgatttggacgacgttctcagctacccgaacgaacgaaagatagcatggttgtacgcaaggaaactcaacagacaggcgtgaaggtgaatcaacccgcacaacggaacgttccgcacggcatgcgtgcgctttcggcaatcctcgccatggttatgaccatggcgttgatgttgttatacgcacctgtgccgaaagccgaagccgaagaaacacaggaatcgcaatccgacaccatgctgtcgatcgactcctccaccgccgtgctgaccgacacttccggctatcatttgagcgcgacggtgaccaacaccaccgatcaggaaatcccttcaggcacgctcacccttgccatgaacgccttctacacgttcgtgtcgcgcaacgatatccaggaatggtcggaaggcatcgggcagattcccacgcccaatatcgttgggcagagcgaggttcccgcgcttcaaccgggagcttcggcgaacgtgcacatcgacgcggactcgaatcaggagacgctggcgtccgtcaactcctgggggccgaaaccggtcacgctcagttatgaggccaatggcgttcaacaagacgaagcgcacactttcgcaacacggaccggagctggaatcaatacccccgacacgcccgcgatgaatatcaccatcgtgcagccgctcgaagcgcaaggatggaccaccgacaacaccatgctggaacagctcgtcaacaaaggtggcgtcacctccgcggaactctcgaaaatcgccgttcccggcaaagaagacgaggcacgactcaagtcgctggaacagacgttcaccaagcatgacaaactgcaggtggtggccgatccaacctatctgaaggcgatgccgatgccgacgcaagtcgacggcatcacgcaaccggccctgttcgacatcaccgcctattccgcgctgaacgacagcaaaacctatgattcggcaggcgtcggcacctcgcaatggaacgccgaacaggccttgaaaaactatcaatcggcgttgggtgacccgaacgcgagtatgaccacgtatgcatggcagggcaccggcaattggaccgccgacgcgctggcgaaagccaagcagcaggggtacgacaccgtcatcgccacgcatgatttcgaagaggatgatgcggccaccgcggaaaccggcaagaccgtagtaaccaccgacgccggcgacatcaccgtactgaccgcgcaaagcgtgctttccaaccttgcacaaggcaaggcgaccagtgccgacgccgaagcggacggcgagggaacaacggccgggcgtctcgcgcgattcgtcgcgcaaagcgcgttctaccagatggagcagccgtattcggaacgcaatctgctggtctgcctgaacggcaactctgatccggccgtcgtggacgcactgatgacggacgtcgaacaatcgccatggctgaacatcaccgatctgaacacgctcaacaacgccgaccccgccttgagcggcgacgatgcagcctcgatcgtgccgcaatccgacggaatcaatgatgcgacgcaagccaatctcaggcagacgctcaacacactggcagcctcgacaaacgacatcaaacgattcaacgcatccatcctcaccgacgtcgccgacgatgccaagcagacccccgcaggcctcaaagcgtggcgcaggcagctcgtcaacgcgcacggcatcatggccctgcacgcgctaggcggcgaaaatccagccggaagcaccatggtggaaggagccgggcaactggcgtccctgctcatcaacggcgtggccatcacaccgacggaaaacgtcaacgtggtcagcgaaaccgcgcaaatgcccgttaccatcagcaacagccacccctatccggtcacggtaaaagtctcatcattgaccaactccatgcagatcgtcacttcgcgtttcgacaccgtggaagtgcccgcgcacagcgaagcccaagtggcgttcaccatccgcgtggccacctccggcaccgcggacgccacgctcagcctgcaggacaggcagggcatcacattcggagcgacacaaaccacccacatcaccagcgcattgcagatcagcgacaaaaccggcttcatcatcatcggcatcgccgtgctgcttggagctttgggactgtggcgccaattccaccgtaagaaggatccagacgaatgagttcttccgttggccgtaattcactgatcatggcctccggcaccgcggcctcgcgcgtgaccgggcaaatccgtaccattctgctcgcttgggctttaggcaccaccggctatgcggcgaacgcctaccaagccggatccatgattccgcaggtgatctacaccttggtttccggcggtattttcaacgccgtgctcgtgccgcagatcgtgcgcacgttgaaggcaaaagacgccgaaaccaaactcaacaagctcatcacgcttgccatcaccatgctgttggcggtgacgatcctgatggccctatgcacgccgctgctcaccaagctgtatgtgaacggtagccccgaaaccatggcgttggcgacctcattcaccctgtggtgcatgccgcagatcttcttctacggcctatatacggtggtcggccagattctcgcggccaaagaccatttcactgcgtatgcgtggagttccgtgggtgcgaacatcatcagctgcatcggcttcggcacgttcatcgcgctattcggccgtgccaccgagcatccgcttgatttttggaccgccgacaaaatcgccctgaccgcaggcacgtggacgttgggcgtggcattccaggcgctggtactgttcattccactgaccaaaatcggattgaaataccgccccatcttcggccttcgtggcattggattgcgttccatgggaccggtcgcggcttggagtgtcggcattgtcgtaatcgaccagctcgccaatatcgtaatcacgcgtacctccactaacgcgccgatgctcgcgcagcagcagttcggcatcaatccgctctacgtggccggcaatgcttcataccagaacgcgtacacgatttacatgttgccgtattcgctgattgccgtttcgctggcaaccgcgattttcccgaaaatatcccgtgcggtcgccgatcataatatcgccgaagcgcgcatcgatctcagccaggcgctgcgcaatatgggtgtgatcatgtgctatttcgcggtcgctttcgtggtgatgcccgttccgatcattctcgcgttgctgccgtctgtgagcgtcagagaggcgattcttatggcgggaccgttggtcacgcttggcgtgggacttccgttcgccagcgcgtatctgattatccagcgcacgttctatgcattcgaagacggcaaatcgccgttcattttcatgctgttcgccatgggcattcaagcggtaagcgtgatcatcggcgcgaaactactcccccctaccgaatggacgacaatgatcggcatggtaggagccatgagctacatactgccgatccccatcctgtatgccatgctgcgcaaacgattcgaaaacaatatcgacggtccgcgcatagccatctcgtatctgaaatcgattggcgcggcagtagctaccatgttcatcggcgtgacggtacgtgacagcgtctaccagcttgtcggcgcccaaatcggagcggtggacggtcatatgaactggattcaggcagtggcgtgtgccgcactgctggccatagtggccttcatcgtttacgtaggcatgttgcggctgctacgttccgaggaattcaaggaggcgatcgcactgatttcctcacgtattcccggacttcgcaagccgaccagccccaacgatagactggaacaggacgacgccgaaaacggcgagtgaccataggcagaacaaacgtttacaaaaagttgaaggaacccatgaaacctcagctgggagataccatcagcaatcgctacgtgctcgtttcgccattgcgcgaagaaaccggactgcaggtctggaaggccagcgaccatgtgctcgcacgggattgccagctgtttattgtcagcagcagcaaggcattgcaggaagtcaacgcaaccgcttccatgctggctatttcgcatgattcccacttcacgaaagtgctgcagctccagcatgccggccaggtcgcgctggtggtgacgcagcttgacgaaggcatgaccctcagtgaatatcttgcgctgaacgccaaccagccgttgagctatacagccatgcgctccatcattggcgaagtcatcgaatcattgcatgcgctgcaaaaagacaatctcacgcatttctccatcagcaccgacacggtgcgactgacccgttccggcattcagatcgcagatgctccagtgagcatcatgcttgccgacacttcccgcgcgcaggctttggaaaatcgggaacagcttgcgatccgtcaaatctcagcgctgttgtacgctatgctgatccgacgcccgtccacgctgtcgacggatttccgtcttgaagcgctcgcgccgaccacgccgatggaattccgcgtgatctgcaagcgcggtctcgaacttgaagaggacgacggcttccccaccgttccgatggcaaccattgcggaattggaagcgttgcttggcgagtaccaaccgctgtcatcgttgggaagcatggatatcacgttgccttccatggattcggaatgctcaatcgccaatgttccgttactgcagattcttgagaaggatgtgctcccgctgccggatacgctggcagcggctggaagcattccggaaatgacgttcacggctcccgaaccgcataacgatttttccgatggcaaggaggctttggcgaaaggcgtcgcggccaccagtggagcggtgaaatcgttgtggagcagcggccgtgaactgctgagcgaagaagacatcgatggcgtgaccgacaccagcgattctcccttctccttccccatcagggtttccgtaccggacgatggcatgtcatccgacgattcccagttggaaaaaaccggtcgcattccagtgatcggcgcggatggtcaggtcattcagcccggcgaggagtccgcccgtgcgttgaaagcagagcaggaggcgatcgatgccgcgtatgccgccggtcgagccgcggttccgccgagcttcacgccgaagaatccttcttccgcttcggcgaatactgacgttgccgacgcgaaactgtttggcaagctgaaaacgaaggtcgttgcgattatcgttgcggtcatcgttgttgcggttgcgcttgggtttgcagttcatggtttgatgcagccttcagattcggttacgactgattcaaaaggaccatggccggaaataaatcttgacgaagtgccgttcggcgaaggagatcagtcggatgcgaattccgcggattcttccaattccgatacgtccggcaataccgattcgtccaattccaaggattcttccgatgcttccgccaatacgccggcatccggcgagtctacggcgtccaagcaacccaagaaaaccgaggacaaggtcgtgaccgccgataagcagtcgaagaaagtgccggatccgaagcagccggaaaacacgaccgcgtacgaaatcgacaatcgtcagttcctgtcgaatcctgacggacagcagggctacggatattacgtgcatctgagccagccgcagaaggcgtatcgcatggtcatcaaaattcgttcttccggtggtcagggatatattcgcgtgaatgcgacaaacagcccgtcccaaggcgaacaggtggcgcagttcgagtttgacgcttccggcacgaccgacatcaagttcgacaaggccgtggaaacgcaggacatcatgctgtgggtcccacttgatagcctgccgggcaaccagctgtacatcgaaagcattcaagtgttctgatcgtcagcacatcgcaatatccgattacttctgaagattgcgatacgaaaagagcctgccatgcgtcacctcacgtatggcaggctcttttcgtatttatttttggaatatggtcgtagtcgaaaagcgatggaacttggctcaagaatcgacaaccaacttttcgccatttttatcactctgatgtcagaactctaatgtcagattcgggagcgtgctcgcggatgattttatgctgcgcgacggctacccccgtctctacagttccgaaatgccgcttgaactcttcttttcgtcatatctcagcacatatgtcgagcgagacgtggccggttatctcaatgtgcgaaacgtgaccgctttccacaaattcctgcgtctttgcgctctgagcggcgctttgtggcggctcgcgtggaatcaagttttcaagccaaagacgagcaggtatattccgccgcagactggctgacgcgctgaaacgtctaccccagcattagtctgacccatgatctggtttggctggcctcatgattgtgatctggcgacctcacgatttcaatcggggacactcttttccagatcgtgaggtcgccaaaacaaaatcatgaggccagatagaagaaatcgtgcggtcaactgacaaatcatgcggtcgctcacataatcccgtccgcacaacccgcacctaaaaccgattaccagagtcacacggacggaatcgcagctaccgccagcacaccccttactccggccaggattcgaagagggtgaggagcgtttcaacgttggtgtcgctccaactgtcgattctgggaccagcatacgtactgttgtatggctgatcgaacacgaccacatgctgccctgcctcacgcaaagtttcgatattcgccggcgaatcgtcaatatgaatcgtggcctgcatactgtctttcagcccagtaaagcacagactcatgtacggaatgcggttgctgtccagccattgcgcggtgtcggaaacgaccatctgatgctggccggacacgaacagccggtgcgtgacaatgcgaatgtacacatgctcattcgccaatcgctgcaatgcctgcgcgacccccggaagcggcttcatcgtcgcatacagatgctcacgctccgcggctttgtgcgtttcgatgtaatcgtcgagcgtctcgaacggccatccgtcctcgcgcgtgagattgtaatgcgcggtctgcagcgcacgttccggcacgtcaatgccctgccgctgcaggtaatcgcggatcgcgcccttgtaatccgcgcaaacgccgtccaaatcgagattgagcacgcgatatccctgcacgcccacgcgctggctctcatattgttcaggaatagtcgccatatcacgttcctttcttatgcccgacaccaatcagcctgtcgaacagccacaccaatcagcccagcccaatcagcccgatatcaatcaatgtaacctgacattcgccggcaacaagcgcaaatactcccgcaaataaggaagatagaaaatggatagaacaatgccgaccttgcgaaaagtcttacgggagaacgattttgagactttcatagaaaagatagaaaagatagaaaatctgaagatcgcgccgtttcttttgcgacggcaatactgccctgcaatcgacgattgatgttcatcacagcatcgttacgtttatttcaagattagccgatgaaaatacaaaagaatcgacgatcgttgcatgacatcgacggttgagcctgcctatgatgaaggcacaacagaacaaagagacacgatgcggcaggaaccggagagaaaaccggagccgcaccccacacgcggggaaacggcaacgccacccgcgctgaacgtaaccaaaaagcaacagacttacggcagcggccagaggaaagaacagaaaacaagaacgccgccaagccgaacgaaaggaaacatcatgaagaacaacactttcaaccagatcatcaacgccaacctcgcttccgtcgatccgggcttcggccagttcgcactcgccaaggccagcgccgatctgttcaagaaggtcatcaacaagtgatccaaggcccgcgcaggcaggcgtcacattaacacgaccgaagggcttgcgctccatgtggagcgcaagccctttctcatgttccgatcaagcgacgccaagaatccagccaccccagcaactgcacacacagcaccgcacgcaaccacgcacaacagctggtgtttcacgtgaaactctgtagatgatccggcttggaaagcacttgataatacgccataagagaaaggaatgcgtgaaattgtgcagtgcgcggctggttgctttggtggttcgctacagtgggaatatgagtgatttgcgagatgtgattattgtcggatccggccctgccggatataccgcggccatatacttgggccgggccggattcaaaccactggtcatcgcgggtgcgctgaccccaggcgggcagctcgtcaacaccactgaagtggagaattttccgggtttccccgacggcgttatgggaccggaactcatggataatatgcaacgccaggctgagaagttcggcgcggaaatcgtttgggatgatgttgtttccgtgagcaacaatgacgtcaccggcgtgaaaaccgtgagcgtcgatcagggagacgtttttgaaacccatgctttgatcatcgcaaccggatcggaatatcgcaaactcgacatccccggagaggcggaatattccggcaagggagtgtcatattgcgcgacctgcgacggcttcttcttccgagataagccgattattgtggtcggcggcggcgatagcgcattcaccgaggctgattttctttcacgatttggatcgtcggtgacgttgattcatcgtcgttctgaattccgcgcatcgcagattctcgtggaacgcgctcagcagaatccgaagatcaccatcgtcacggattccgtggtggaggaaatcttgggtgacgacaatggagcccaatccgtgaacattcgcaacgtcatcaccggagaaaccagcacgattgccgcaaacggcatttttgtggcgatcggccactcccccgccacagcttttattgacggcattgtgcagcgagatgcgggtggatatattcaggtggacggcgccagcacacgcaccagcactgccggcatttttgcagctggcgactgtgttgatagtatttaccgtcaagcgatcagtgccgccggcatgggctgccgggccgccctcgatgcccaagcctacctccagcagtaacacttcccatcacggtcataccctacaaaaacttgaaaaacgagcggaaggggcggcatattctgttcacgactgtaagcttggccaaacggccttgagtgtgtcgtgaacagaatatgccgccccttccgcggacaccaaaaaacttaagaaatactatttttcggcagtgggcatgagcaggtcgacaatgcgcttcatgtcgtcttcggatttgaacacgatttcgatgcgtccatgctccttggatcccttgatcgacaccttcgtaccgaacctcttttcaagaccgacctgcatcggagttccggcccaagggttcagcttattggttttcgctttcttcggctggtccgattcagcgaccttcatcgacacgatttcctcggtgctgcgtaccgacaacccttcggaaataatgcgcgtcgcaagctgttccatgtcagcttccgtcggtaatccgagcaatgcgcgcgcatgaccggccgacagcaacccggaagcaaccttcttttgtacggtcgcaggcagattcagcagtcgcagagtattggcgatttgcggacgcgacttcgacaccgactttgacaattgcgcctgcgtcaagccaaaatcgtcgatcatctgctgataggcggccgcctcttccaatggattcaacgcaacgcgatgcaggttttccagcaaagcgtcacgcaacatatcgtcgtcggcagtggttttgacaatcgcaggaatcgttttcaaacctgcgatctgcgatgcacgccaacgacgttcacccataatgagctcgtacatgctatccatgcgcccgtcgaacatattgtgcgactcggcatctttagcggcgttctccttgcgagcagcctcaatctgcgcgagtggacgcttccgtacgacaataggctgcagcacgccgacttctttgatggaatcggcaagctcacgaagatcatcctcatcgaaaatggtacgcggctgatgcaggttcggtccaacatcactcagtcgcaattcaacgagataaccgccctgcaccggcaacagttcaggttcgtcattcttcttatcttcggtcttttttaccgcagcggtttcacgtgaaacactttcctgcttcacttcggcagtggcaacaggactggtggaaccgaagaacatgtcggcaggatgagcagtctcattcaacgtgatggaaggcatactggctcgatggccactccccttcttggtttcacgtgaaacgttcttcttcatgtcatggacggcatcgacggaagccttggcggttgccacggaactcttgaccgcggtcttccccgcggattgcccggcaacagtcgcaccaccggctacgttttctgaaacctttccagcgatcttgttatcagcctttgcacccgcaacagccacagccggttcagtagtggcttccgatttcgccgactctcctggaagagacggaaacagtgcgccgagacccttgcctaaacgtgatttcgtagccatgatcagttctcattccttcttgcatcgatagccttcagcaccgtctgcgagcgacgtgcgatttccaatgcggcctcacaataggcaatcgctcccattcccttgggatcgtaggcgatcacgctttgattgaagcttggagcttccgatattttcaccgttcggggaatcgtggtattcagtacgatagtcggataatgttttttgacttcgtcatgcacttcacggctgagtaacgtcctcttatcgaacatggtgatcagcatggtggaaaccagcagcgacggattgaaatgctcctgcaccagtccgatggtattgatgagctggccgagaccttccagcgcatagtactcagcctggatcggaatcagcatctcatgcaccgcacacatggcattaattaccagcaggccgaggcttggcgggcaatcgataatcacgtagtcgtagtgctcctcgctggtttccagaaactcgtcaaccgcggtcttcagaagcacattacgattttccatgtcggcgacttccagctcggcaccgctcaaatcgatcgaagctggaaccacatcgagcagatcaaaatcagggcatgtgcgcttgacttcggcgatggtcttcctgccttcgatcacgtcgtacaccgaaggctcccccgacgcatgcggagcgcccaacgcggtcgacgcattgccctgcggatccatatcgatcagcagcaccttggaaccgaactgagccaacgcagcggaaagattcacggccgacgtggttttgccaacgccacccttctggttggcgaccgcgatcaggcgcgtctgctccggctttgggcaaacggccttctgcaaggcgcgatagcgagtcgattcgtcggcaatctgcgaaccaagaggagaatccgatcctccgaaaattcgtttgatggtttccgttgccgattccatcgatgtcaggttatctggtccttcaggtccagtcatacactagccttccttacgatatgcttaacattcaagtttcatcattcgggtggacagaatcagctcatctcacccactgtgcacaaatgtgaatagctgtggatagtcggtggataacttacgttgttcgcaaaaagttatccaccgatctttcgttgctacttcaacatttttccgccgctttttttcgtcgattttccagttgtggacaatgtgcataactcaccgaaatggtggataacttactttttatccaccatgagcacatgggtcgattccaagcccggaccaacctcggcatccaccacccgcggacgaatgccaccgcatttggcgatctctttggaagccttttcgatctcctcttgcgcggaccgccccttcagtgcgaccaaacgtccaccgcgctcaagcaacggcagcgtccaccccgaaagtttggtcataggagccacggcacggcacgtcaccacggcaaacggatgtttcgcctgaataggcttgccatccaaatccagtacaggaccgcgaacggccactcccctgccgttcttgccgcctttgccgttcctggcgcttccattgccacgattgccgccttgagcgccagtagcacccgcaatggcctcgatcatctcattggccctggcacgcaccacggtaacgttattcaactccatatcggccacgcactcgttcagccattcgacacgacgttccatcggctccacaagcgtgaaccggtgatccggcaggcaggcggccgcgacaataccgggaaaaccgccgccactgccgatatcggcaaccgtcttgaactgcttcttggccgtggcttcctttacgaaaggcacaatggcggccgaattcagaatatggcgttcccaaataatgccaacatctcttggcccaatcagaccgcgaggttcgccttcttcggcaagtttcgcatggaaaacacgaagcttgcccaacgcatcccccagcacttcctcaagcatcggcgaatcatcaagttcgtctgtcacatcactcatgggcaccatcctatatcctgctcttcctcattgtcggtattccagcaagtacttcccgaccattgacggcaatatcacatgtccggcgcacggccagcatgaagtcactcaaaaaatcgcaataaaaaaagcgccaccaaatggtgacgccatgtttcacgtgaaacgagccgaactcaggcctcatcctcgtcttcagcatcttcggcagcggaagccttgagatacaccgtgacgtaacgacgcggttcctcgccgtgggaacgggacttcatgccctcctcacgcaccacatcatgcacgatcttgcgttcgaaggagttcatcggcttgagatcaaccggctcccccgtctcgcgcacctcgtcgatggcgtccagcgcgatgtcgtgcagacgctggcgcttgcgcttcagatagccgtcgacgtccacaatgagatgggaacgctcgccggtcttctgctgcacggccagtcgcgtcagctgctgcagagcgtcaacgacttcgccgttgcgtccgatgagatgcttgatgtccgtatcatcatcggcgacgatttgcacggtagggcgattgttgcgcacgcccatttcgatatcgccttcgtaatcgacgatatcaagcagtccttcaagataatcggcagcgatatcagcttcctcgttgagctgatcgatggtcttttcctcatcttgcgccatagtggttgtactcctttgagcggggtttctattactaaagtcttattgtgtaaagtctaattcctgtttaccacgtcgacaataaacgctgataaaagtggtgtgtcccgcgtttcacgtgaaacacgggacacacttttactcacttctttttctttttacggctcggctgctgacgctggtagccgctcttttccttcacttcggcggcttccttggccttctgcagcgcctcttcctcgagggatggcagaccggccttggctcggcgggcgttctcatgaacatgatcacgcttttccttcgcttcggcggccggagatcccggagtcgggaagacgtggatctgccagatggaacgcaacagattgcagatgttgttggtgagccagtacaccagcacagcgaacggcatggcaataccggagaaaatgtacatgatcgggaacatccacaacatcatcttctgcatcatttcggtctgcttgtttgccgcagactgagccatgttacgcttcatgctgttgtactgcatgaaccacaggcagaagcacatcaatgcaacgaagatggcgataactactttgccatgcacggcggcggtcgtgaagttatcagccacgttcacaccgaacactgtggtggacgtgaactgcttggctgtggcgatgtcgaaagcgccaagaccctgtccgtccctgaatttgccgcgtgcgatgtacggaatggctgacagcgtatagaacatgcacatgaatacgggaccctgcacgaacatagggagcatggaagtgcagccacccatcgggttcgcatcattgtcctggtagagcttcatcatctcgcgctgcatggcttccttgctggcgggatcgttcttgcccttgtatttgttttggatacgctgcatctttggctgcaggacggtcatctgggcctgcatcttgcgcatacccttcatggacttgtagaacagcggaaaaacgcatgcctggaccacaagtactaggaatacgatggacatgacccacgagaaaccgatctcgttcatgcccagcatcaccaggaacttatggaatacggccatgatctgcgtcatgagccactcgacgggatacaggagcttatacagccagccccagaaaccgctgtcgaggaggaattgattttgattcattacaggccagtctccttatcgcctataggtttttctacgttcagaggcgtgagccgaggttcctcgtgtgccttcgaccacgaacatctgtaaaacaaggaataaagctgcggaacgtcgtcaattcccccacggttccactgattgcagcgaagaaggcgcaataacgcaagaaggccacccttaaggcggccaaatcgttcaatcgcctgaatcgcgtaattggaacaacttggataatatctgcagcaaggcgcggtattcgcggaaatatgacgttggtaccagcgaatggcacgaatcatccaatttccgttacgaccggcgttcattaccgacgcacggccttacgattcaccgcttcaaaacatgctgcgatctgctgctccaacgatagaaaatcggcatgcgcagaacttggcttggcacgcaacacgatatcgcaggattcaggtaaggcagattcgtactttcgtgcaagcacgcggaaacgacgcttgacggcattacgcgtcacagcgttgccgacagccttggaaacggccaaaccgacacgtcggccccgcatcgccgcagaatcgtcgataatggcatcgtcgtgcaccaaataatgcacgacgatgtcttctcgcgataccctacgacggcgtttgagcaccgcgacgaaatcgcgatggcttttcagccgttccaccgctctatgccgttaaatcaggcagcgagggacttgcggcccttggcgcggcgacggttgatcagagcgcggcctgcgcgggtgcgcatgcgctgacggaaaccgtgcttcatgtgacgacgacggttgttcggctggaatgtcctcttcataattaatgctcccggtgttttttgccatgccaaggcacggctcctcatgagtcaagctctaccaagttactctgacccctgaacagagatgaatgcgcatatcaaatccttcacattttcatggggattctccccacaaaacaatccacagaaacgttgatatgtcgccaaactccccacaaaagttatccacaaactacaatgatgttattcacaattcagtcttttcaacacgcttaccggtggataacttggggaaaagagagtacaaataaacagttgcacacttggaaaaagtctgtcgagaaaggggaatcc
